(19) United States
(12) Patent Application Publication
(10) Pub. No.: US 2016/0033511 A1
(43) Pub. Date: Feb. 4, 2016

(54) METHODS AND COMPOSITIONS FOR DETECTING PANCREATIC CANCER

(71) Applicant: CREATICS LLC, Braintree, MA (US)

(72) Inventors: Lewis K. Pannell, Mobile, AL (US); Jana Rocker, Mobile, AL (US)

(21) Appl. No.: 14/773,969

(22) PCT Filed: Mar. 13, 2014
(86) PCT No.: PCT/US2014/026857

§ 371 Date: Sep. 9, 2015

Related U.S. Application Data
(60) Provisional application No. 61/780,574, filed on Mar. 13, 2013.

(51) Int. Cl. G01N 33/574

(52) U.S. Cl. CPC G01N 33/57438

(57) ABSTRACT

The present invention relates to non-invasive methods for the diagnosis and prognosis of pancreatic cancer. In some embodiments, such methods and compositions relate to particular pancreatic cancer biomarkers and combinations thereof.

### RELATED APPLICATIONS

[0001] This application claims priority to U.S. Provisional Application No. 61/780,574, filed Mar. 13, 2013, the entire contents of which are hereby incorporated by reference herein.

### FIELD OF THE INVENTION

[0002] The present invention relates to non-invasive methods for the diagnosis and prognosis of pancreatic cancer. In some embodiments, such methods and compositions relate to particular biomarkers and combinations thereof.

### BACKGROUND OF THE INVENTION

[0003] Disorders associated with the gastrointestinal (GI) and hepatobiliary tracts and the organs/tissues associated with the gastrointestinal tract include cancers such as gastric cancer, esophageal cancer, liver cancer, and pancreatic cancer. Pancreatic cancer (e.g., pancreatic adenocarcinoma), in particular, is a malignant growth of the pancreas that mainly occurs in the cells of the pancreatic ducts. This disease is the ninth most common form of cancer, yet it is the fourth and fifth leading cause of cancer deaths in men and women, respectively. Cancer of the pancreas is almost always fatal, with a five-year survival rate that is less than 3%.

[0004] The most common symptoms of pancreatic cancer include jaundice, abdominal pain, and weight loss, which, together with other presenting factors, are often nonspecific in nature. Thus, diagnosing pancreatic cancer at an early stage of tumor growth is often difficult and requires extensive diagnostic work-up, often times incidentally discovered during exploratory surgery. Endoscopic ultrasonography is an example of a non-surgical technique available for diagnosis of pancreatic cancer. However, reliable detection of small tumors, as well as differentiation of pancreatic cancer from focal pancreatitis, is difficult. The vast majority of patients with pancreatic cancer are presently diagnosed at a late stage when the tumor has already extended beyond the pancreas to invade surrounding organs and/or has metastasized extensively. Gold et al., Crit. Rev. Oncology/Hematology, 39:147-54 (2001), incorporated herein by reference in its entirety. Late detection of the disease is common with the majority of patients being diagnosed with advanced disease often resulting in death; only a minority of patients are detected with early stage disease.

[0005] Invasive techniques to diagnose disorders and diseases related to the gastrointestinal tract are inconvenient and expose a subject to significant risk. Examples of non-invasive methods to identify patients with disorders of the gastrointestinal tract or associated organs/tissues are described in PCT/US2011/051269 filed Sep. 12, 2011 entitled “NON-INVASIVE METHODS OF DETECTING PANCREATIC CANCER BIOMARKERS” which is incorporated by reference herein in its entirety. Nonetheless, there remains a need for additional methods for the diagnosis and prognosis of disorders such as pancreatic cancer.

### SUMMARY OF THE INVENTION

### Diagnostic Methods

[0006] In one aspect, the present invention is directed to a method of assessing whether a subject is afflicted with pancreatic cancer, the method including determining the level of at least one pancreatic cancer biomarker in a sample derived from said subject; and comparing the level of the pancreatic cancer biomarker with the level of the pancreatic cancer biomarker in a control sample, wherein a difference between the level of the pancreatic cancer biomarker derived from said subject and the pancreatic cancer biomarker in the control sample is an indication that the subject is afflicted with pancreatic cancer.

[0007] In various embodiments, the pancreatic cancer biomarker is CA19-9 or a protein comprising an amino acid sequence selected from the group consisting of SEQ ID NOs:1-31 and 38-793, or a fragment thereof. In certain embodiments, the pancreatic cancer biomarker is CA19-9 or a protein comprising an amino acid sequence selected from the group consisting of SEQ ID NOs:1-19, 47, 49-58, 206, 726, 729, 780 or 793, or a fragment thereof. In a particular embodiment, pancreatic cancer biomarker is a nucleotide sequence encoding the protein or the fragment thereof. In another embodiment, the pancreatic cancer biomarker is CA19-9.

[0008] In various embodiments, the sample is selected from the group consisting of a fecal sample, a gastrointestinal lavage fluid, and a combination thereof. In a particular embodiment, the sample is gastrointestinal lavage fluid.

[0009] In certain embodiments, the method includes determining the level of at least 2 pancreatic cancer biomarkers and comparing the level of each of the pancreatic cancer biomarkers to the respective level of the pancreatic cancer biomarkers in the control sample. In a particular embodiment, the method includes determining the level of at least 3, 4, 6, 7, 8, 9 or 10 pancreatic cancer biomarkers and comparing the level of each of the pancreatic cancer biomarkers to the respective level of the pancreatic cancer biomarkers in the control sample.

[0010] In one embodiment, the subject is a human.

[0011] In various embodiments, the method involves administering a lavage fluid and collecting the sample, for example, a gastrointestinal lavage fluid. In a particular embodiment, the lavage fluid is administered orally. In a particular embodiment, the lavage fluid includes an ingredient selected from the group consisting of polyethylene glycol, magnesium sulfate, sodium sulfate, potassium sulfate, magnesium citrate, ascorbic acid, sodium picosulfate, and bisacodyl. For example, the lavage fluid is selected from the group consisting of GOLYTELY, HALFLYTELY, NULYTELY, SUPREP, FLEET'S PHOSPHO-SODA, magnesium citrate, and their generic equivalents. In a particular embodiment, the method further includes partially purging the subject's gastrointestinal system and collecting gastrointestinal lavage fluid.

[0012] In one embodiment, the difference is a decrease in the level of the pancreatic cancer biomarker derived from said subject and the pancreatic cancer biomarker in the control sample, and wherein said decrease is an indication that the subject is afflicted with pancreatic cancer. For example, the pancreatic cancer biomarker may be a protein encoded by an amino acid sequence selected from the group consisting of SEQ ID NOs:1-16, 49, 55-58, 206 and 793, or a fragment thereof. In a particular embodiment, the level of the pancreatic cancer biomarker derived from said subject is at least 3 times less than the level of the pancreatic cancer biomarker in the control sample. Alternatively, the level of the pancreatic cancer biomarker derived from said subject is at least 5, 10 or 100 times less than the level of the pancreatic cancer biomarker in the control sample.

[0013] In another embodiment, the difference is an increase in the level of the pancreatic cancer biomarker derived from said subject and the pancreatic cancer biomarker in the control sample, and wherein said increase is an indication that the subject is afflicted with pancreatic cancer. For example, the pancreatic cancer biomarker may be a protein encoded by an amino acid sequence selected from the group consisting of SEQ ID NOs:17-19, 47, 726, 729 or 780, or a fragment thereof. Alternatively, the pancreatic cancer biomarker may be CA19-9. In various embodiments, the level of the pancreatic cancer biomarker derived from said subject is at least 3 times more than the level of the pancreatic cancer biomarker in the control sample. In a particular embodiment, the level of the pancreatic cancer biomarker derived from said subject is at least 5, 10 or 100 times more than the level of the pancreatic cancer biomarker in the control sample.

[0014] In one embodiment, the pancreatic cancer biomarker is derived from the pancreas. Alternatively, the pancreatic cancer biomarker may be derived from elsewhere in the gastrointestinal tract, for example the intestine.

[0015] In certain embodiments, the pancreatic cancer is selected from the group consisting of an exocrine pancreatic cancer, a pancreatic cystic neoplasm and a pancreatic endocrine cancer. For example, the pancreatic cancer may be an exocrine pancreatic cancer selected from the group consisting of pancreatic ductal adenocarcinoma (PDAC), adenosquamous carcinoma, squamous cell carcinoma, giant cell carcinoma, acinar cell carcinoma and small cell carcinoma. In a particular embodiment, the pancreatic cancer is pancreatic ductal adenocarcinoma. Alternatively, the pancreatic cancer may be a pancreatic endocrine tumor selected from the group consisting of insulinomas, glucagonomas, somatostatinomas, gastrinomas, VlPomas and non-secreting islet tumors of the pancreas.

[0016] In various embodiments, determining the level of said at least pancreatic cancer biomarker includes performing an immunoassay or a colorimetric assay. For example, the immunoassay may be a Western blot, an enzyme linked immunoabsorbent assay (ELISA), and a radioimmunoassay. In a particular embodiment, the immunoassay is an ELISA.

[0017] Alternatively, determining the level of said at least pancreatic cancer biomarker includes performing mass spectrometry.

[0018] Alternatively, determining the level of said at least pancreatic cancer biomarker includes applying said sample to a solid phase test strip or a flow-through strip including an agent which selectively binds to said pancreatic cancer biomarker; and detecting said pancreatic cancer biomarker bound to said agent on said solid phase test strip or said flow-through strip.

[0019] In particular embodiments, the method further involves comparing the level of the pancreatic cancer biomarker from the subject with the level of at least control polypeptide, or fragment thereof, or a nucleic acid encoding said at least control polypeptide, derived from the sample. For example, the control polypeptide may be a non-pancreatic polypeptide that originates in the gastrointestinal tract. In a particular embodiment, the control polypeptide comprises an amino acid sequence selected from the group consisting of SEQ ID NOs:27, 32-40, 45, 54, 59 and 59, or a fragment thereof.

### Prognostic Methods

[0020] In another aspect, the present invention is directed to a method of assessing the progression of pancreatic cancer in a subject afflicted with pancreatic cancer, by determining the level of at least one pancreatic cancer biomarker in a sample derived from said subject; and comparing the level of the pancreatic cancer biomarker with the level of the pancreatic cancer biomarker in a control sample, wherein a decrease in the level of the pancreatic cancer biomarker derived from said subject and the pancreatic cancer biomarker in the control sample is an indication that the pancreatic cancer will progress rapidly; and wherein an increase in the level of the pancreatic cancer biomarker derived from said subject and the pancreatic cancer biomarker in the control sample is an indication that the pancreatic cancer will progress slowly or will regress; optionally, wherein the pancreatic cancer biomarker is CA19-9, a protein encoded by an amino acid sequence selected from the group consisting of SEQ ID NOs:1-31 or 39-793, a fragment thereof, or a nucleotide sequence encoding the protein or fragment thereof. For example, the pancreatic cancer biomarker may be a protein encoded by an amino acid sequence selected from the group consisting of SEQ ID NOs:1-16, 49, 55-58, 206 and 793, a fragment thereof or a nucleotide sequence encoding the protein or the fragment thereof.

[0021] In another aspect, the present invention is directed to a method of assessing the progression of pancreatic cancer in a subject afflicted with pancreatic cancer, by determining the level of at least one pancreatic cancer biomarker in a sample derived from said subject; and comparing the level of the pancreatic cancer biomarker with the level of the pancreatic cancer biomarker in a control sample, wherein an increase in the level of the pancreatic cancer biomarker derived from said subject and the pancreatic cancer biomarker in the control sample is an indication that the pancreatic cancer will progress rapidly; and wherein a decrease in the level of the pancreatic cancer biomarker derived from said subject and the pancreatic cancer biomarker in the control sample is an indication that the pancreatic cancer will progress slowly or will regress; optionally, wherein the pancreatic cancer biomarker is CA19-9, a protein encoded by an amino acid sequence selected from the group consisting of SEQ ID NOs:1-31 or 39-793, a fragment thereof, or a nucleotide sequence encoding the protein or fragment thereof. For example, the pancreatic cancer biomarker may be CA19-9 or a protein encoded by an amino acid sequence selected from the group consisting of SEQ ID NOs:17-19, 47, 726, 729 or 780, a fragment thereof, or a nucleotide sequence encoding the protein or the fragment thereof.

[0022] In various embodiments of the foregoing aspects, the sample is selected from the group consisting of a fecal sample, a gastrointestinal lavage fluid, and a combination thereof. In a particular embodiment, the sample is gastrointestinal lavage fluid.

[0023] In certain embodiments of the foregoing aspects, the method includes determining the level of at least 2 pancreatic cancer biomarkers and comparing the level of each of the pancreatic cancer biomarkers to the respective level of the pancreatic cancer biomarkers in the control sample. In a particular embodiment, the method includes determining the level of at least 3, 4, 6, 7, 8, 9 or 10 pancreatic cancer biomarkers and comparing the level of each of the pancreatic cancer biomarkers to the respective level of the pancreatic cancer biomarkers in the control sample.

[0024] In one embodiment, the subject is a human.

[0025] In various embodiments, the method involves administering a lavage fluid and collecting the sample, for example, a gastrointestinal lavage fluid. In a particular embodiment, the lavage fluid is administered orally. In a particular embodiment, the lavage fluid includes an ingredient selected from the group consisting of polyethylene glycol, magnesium sulfate, sodium sulfate, potassium sulfate, magnesium citrate, ascorbic acid, sodium picosulfate, and bisacodyl. For example, the lavage fluid is selected from the group consisting of GOLYTELY, HALFLYTELY, NULYTELY, SUPREP, FLEET'S PHOSPHO-SODA, magnesium citrate, and their generic equivalents. In a particular embodiment, the method further includes partially purging the subject's gastrointestinal system and collecting gastrointestinal lavage fluid.

[0026] In certain embodiments of the foregoing aspects, the decrease is at least 3, 5, 10 or 100 times less than the level of pancreatic cancer biomarker in the control sample. Alternatively, the increase is at least 3, 5, 10 or 100 times more than the level of pancreatic cancer biomarker in the control sample.

[0027] In one embodiment, the pancreatic cancer biomarker is derived from the pancreas. Alternatively, the pancreatic cancer biomarker may be derived from elsewhere in the gastrointestinal tract, for example the intestine.

[0028] In certain embodiments, the pancreatic cancer is selected from the group consisting of an exocrine pancreatic cancer, a pancreatic cystic neoplasm and a pancreatic endocrine cancer. For example, the pancreatic cancer may be an exocrine pancreatic cancer selected from the group consisting of pancreatic ductal adenocarcinoma (PDAC), adenosquamous carcinoma, squamous cell carcinoma, giant cell carcinoma, acinar cell carcinoma and small cell carcinoma. In a particular embodiment, the pancreatic cancer is pancreatic ductal adenocarcinoma. Alternatively, the pancreatic cancer may be a pancreatic endocrine tumor selected from the group consisting of insulinomas, glucagonomas, somatostatinomas, gastrinomas, VlPomas and non-secreting islet tumors of the pancreas.

[0029] In various embodiments, determining the level of said at least pancreatic cancer biomarker includes performing an immunoassay or a colorimetric assay. For example, the immunoassay may be a Western blot, an enzyme linked immunoabsorbent assay (ELISA), and a radioimmunoassay. In a particular embodiment, the immunoassay is an ELISA.

[0030] Alternatively, determining the level of said at least pancreatic cancer biomarker includes performing mass spectrometry.

[0031] Alternatively, determining the level of said at least pancreatic cancer biomarker includes applying said sample to a solid phase test strip or a flow-through strip including an agent which selectively binds to said pancreatic cancer biomarker; and detecting said pancreatic cancer biomarker bound to said agent on said solid phase test strip or said flow-through strip.

[0032] In particular embodiments, the method further involves comparing the level of the pancreatic cancer biomarker from the subject with the level of at least control polypeptide, or fragment thereof, or a nucleic acid encoding said at least control polypeptide, derived from the sample. For example, the control polypeptide may be a non-pancreatic polypeptide that originates in the gastrointestinal tract. In a particular embodiment, the control polypeptide comprises an amino acid sequence selected from the group consisting of SEQ ID NOs:27, 32-40, 45, 54, 59 and 59, or a fragment thereof.

### Methods of Monitoring Treatment and Method of Treating

[0033] In another aspect, the present invention is directed to a method of monitoring the efficacy of treatment of pancreatic cancer in a subject suffering from pancreatic cancer, by determining the level of at least one pancreatic cancer biomarker in a sample derived from said subject, wherein said subject has been previously exposed to treatment for pancreatic cancer; and comparing the level of the pancreatic cancer biomarker with the level of the pancreatic cancer biomarker in a control sample, wherein a decrease in the level of the pancreatic cancer biomarker derived from said subject and the pancreatic cancer biomarker in the control sample is an indication that the treatment is not efficacious; and wherein an increase in the level of the pancreatic cancer biomarker derived from said subject and the pancreatic cancer biomarker in the control sample is an indication that the pancreatic cancer is efficacious; optionally, wherein the pancreatic cancer biomarker is CA19-9, a protein encoded by an amino acid sequence selected from the group consisting of SEQ ID NOs:1-31 or 39-793, a fragment thereof, or a nucleotide sequence encoding the protein or fragment thereof. For example, the pancreatic cancer biomarker may be a protein encoded by an amino acid sequence selected from the group consisting of SEQ ID NOs:1-16, 49, 55-58, 206 and 793, a fragment thereof or a nucleotide sequence encoding the protein or the fragment thereof.

[0034] In another aspect, the present invention is directed to a method of monitoring the efficacy of treatment of pancreatic cancer in a subject suffering from pancreatic cancer, by determining the level of at least one pancreatic cancer biomarker in a sample derived from said subject, wherein said subject has been previously exposed to treatment for pancreatic cancer; and comparing the level of the pancreatic cancer biomarker with the level of the pancreatic cancer biomarker in a control sample, wherein an increase in the level of the pancreatic cancer biomarker derived from said subject and the pancreatic cancer biomarker in the control sample is an indication that the treatment is not efficacious; and wherein a decrease in the level of the pancreatic cancer biomarker derived from said subject and the pancreatic cancer biomarker in the control sample is an indication that the pancreatic cancer is efficacious; optionally, wherein the pancreatic cancer biomarker is CA19-9, a protein encoded by an amino acid sequence selected from the group consisting of SEQ ID NOs:1-31 or 39-793, a fragment thereof, or a nucleotide sequence encoding the protein or fragment thereof. For example, the pancreatic cancer biomarker may be CA19-9 or a protein encoded by an amino acid sequence selected from the group consisting of SEQ ID NOs:17-19, 47, 726, 729 or 780, a fragment thereof, or a nucleotide sequence encoding the protein or the fragment thereof.

[0035] In another aspect, the present invention is directed to a method of treating a subject having pancreatic cancer, by determining the level of at least one pancreatic cancer biomarker in a sample derived from said subject; and comparing the level of the pancreatic cancer biomarker with the level of the pancreatic cancer biomarker in a control sample, wherein a difference between the level of the pancreatic cancer biomarker derived from said subject and the pancreatic cancer biomarker in the control sample is an indication that the subject is afflicted with pancreatic cancer; and exposing said subject to therapeutically effective treatment, thereby treating the subject having pancreatic cancer; optionally, wherein the pancreatic cancer biomarker is CA19-9, a protein encoded by an amino acid sequence selected from the group consisting of SEQ ID NOs:1-31 or 39-793, a fragment thereof, or a nucleotide sequence encoding the protein or fragment thereof.

[0036] In various embodiments of the foregoing aspects of the invention, the treatment is selected from the group consisting of surgery, radiation, chemotherapy or a combination thereof. For example, surgery may comprise the Whipple procedure, total pancreatectomy, distal pancreatectomy, surgical biliary bypass, endoscopic stent placement or gastric bypass. Alternatively, treatment may consist of administration of agents for treatment including, for example, tyrosine kinase inhibitors (TKIs) such as Erlotinib.

[0037] In various embodiments of the foregoing aspects, the sample is selected from the group consisting of a fecal sample, a gastrointestinal lavage fluid, and a combination thereof. In a particular embodiment, the sample is gastrointestinal lavage fluid.

[0038] In certain embodiments of the foregoing aspects, the method includes determining the level of at least 2 pancreatic cancer biomarkers and comparing the level of each of the pancreatic cancer biomarkers to the respective level of the pancreatic cancer biomarkers in the control sample. In a particular embodiment, the method includes determining the level of at least 3, 4, 6, 7, 8, 9 or 10 pancreatic cancer biomarkers and comparing the level of each of the pancreatic cancer biomarkers to the respective level of the pancreatic cancer biomarkers in the control sample.

[0039] In one embodiment, the subject is a human.

[0040] In various embodiments, the method involves administering a lavage fluid and collecting the sample, for example, a gastrointestinal lavage fluid. In a particular embodiment, the lavage fluid is administered orally. In a particular embodiment, the lavage fluid includes an ingredient selected from the group consisting of polyethylene glycol, magnesium sulfate, sodium sulfate, potassium sulfate, magnesium citrate, ascorbic acid, sodium picosulfate, and bisacodyl. For example, the lavage fluid is selected from the group consisting of GOLYTELY, HALFLYTELY, NULYTELY, SUPREP, FLEET'S PHOSPHO-SODA, magnesium citrate, and their generic equivalents. In a particular embodiment, the method further includes partially purging the subject's gastrointestinal system and collecting gastrointestinal lavage fluid.

[0041] In certain embodiments of the foregoing aspects, the decrease is at least 3, 5, 10 or 100 times less than the level of pancreatic cancer biomarker in the control sample. Alternatively, the increase is at least 3, 5, 10 or 100 times more than the level of pancreatic cancer biomarker in the control sample.

[0042] In one embodiment, the pancreatic cancer biomarker is derived from the pancreas. Alternatively, the pancreatic cancer biomarker may be derived from elsewhere in the gastrointestinal tract, for example the intestine.

[0043] In certain embodiments, the pancreatic cancer is selected from the group consisting of an exocrine pancreatic cancer, a pancreatic cystic neoplasm and a pancreatic endocrine cancer. For example, the pancreatic cancer may be an exocrine pancreatic cancer selected from the group consisting of pancreatic ductal adenocarcinoma (PDAC), adenosquamous carcinoma, squamous cell carcinoma, giant cell carcinoma, acinar cell carcinoma and small cell carcinoma. In a particular embodiment, the pancreatic cancer is pancreatic ductal adenocarcinoma. Alternatively, the pancreatic cancer may be a pancreatic endocrine tumor selected from the group consisting of insulinomas, glucagonomas, somatostatinomas, gastrinomas, VlPomas and non-secreting islet tumors of the pancreas.

[0044] In various embodiments, determining the level of said at least pancreatic cancer biomarker includes performing an immunoassay or a colorimetric assay. For example, the immunoassay may be a Western blot, an enzyme linked immunoabsorbent assay (ELISA), and a radioimmunoassay. In a particular embodiment, the immunoassay is an ELISA.

[0045] Alternatively, determining the level of said at least pancreatic cancer biomarker includes performing mass spectrometry.

[0046] Alternatively, determining the level of said at least pancreatic cancer biomarker includes applying said sample to a solid phase test strip or a flow-through strip including an agent which selectively binds to said pancreatic cancer biomarker; and detecting said pancreatic cancer biomarker bound to said agent on said solid phase test strip or said flow-through strip.

[0047] In particular embodiments, the method further involves comparing the level of the pancreatic cancer biomarker from the subject with the level of at least control polypeptide, or fragment thereof, or a nucleic acid encoding said at least control polypeptide, derived from the sample. For example, the control polypeptide may be a non-pancreatic polypeptide that originates in the gastrointestinal tract. In a particular embodiment, the control polypeptide comprises an amino acid sequence selected from the group consisting of SEQ ID NOs:27, 32-40, 45, 54, 59 and 59, or a fragment thereof.

### Kit

[0048] In a further aspect, the present invention is directed to a kit for determining the presence, absence or progression of pancreatic cancer in a subject including an agent that selectively binds to at least one pancreatic cancer biomarker.

[0049] For example, the pancreatic cancer biomarker may be CA19-9 or a protein having an amino acid sequence selected from the group consisting of SEQ ID NOs:1-31 or 39-793, or a fragment thereof. In a particular embodiment, the pancreatic cancer biomarker is CA19-9 or a protein comprising an amino acid sequence selected from the group consisting of SEQ ID NOs:1-19, 47, 49-58, 206, 726, 729, 780 or 793. In a particular embodiment, the pancreatic cancer biomarker is a nucleotide sequence encoding the foregoing protein.

[0050] In a particular embodiment, the kit includes at least two agents that selectively bind to at least one pancreatic cancer biomarker. For example, the kit can include at least three, four or five agents that selectively bind to at least one pancreatic cancer biomarker. In a particular embodiments, the agent is an antibody or antigen-binding fragment thereof. In certain embodiments the agent is attached to a solid support, such as a solid phase test strip or a flow-through test strip. In further embodiments, the kit includes a detectable agent which selectively binds to said pancreatic cancer biomarker.

[0051] In various embodiments, the kit includes a lavage fluid for oral administration to a subject and, optionally, a vessel for collecting the gastrointestinal lavage fluid from the subject.

### Compositions

[0052] Some compositions and methods provided herein include an isolated polypeptide consisting essentially of an amino acid sequence selected from the group consisting of a polypeptide comprising, consisting essentially of, or consisting of SEQ ID NOs:1-31 or 39-793 or a fragment thereof, wherein said polypeptide is differentially expressed in cancer.

[0053] Some compositions and methods provided herein include an isolated nucleic acid encoding a polypeptide consisting essentially of an amino acid sequence selected from the group consisting of a polypeptide comprising, consisting essentially of, or consisting of SEQ ID NOs:1-31 or 39-793 or a fragment thereof, wherein said polypeptide is differentially expressed in cancer.

[0054] Some compositions and methods provided herein include an isolated polypeptide consisting of an amino acid sequence selected from the group consisting of a polypeptide comprising, consisting essentially of, or consisting of SEQ ID NOs:1-31 or 39-793 or a fragment thereof, wherein said polypeptide is differentially expressed in cancer.

[0055] Some compositions and methods provided herein include an isolated nucleic acid encoding a polypeptide consisting of an amino acid sequence selected from the group consisting of a polypeptide comprising, consisting essentially of, or consisting of SEQ ID NOs:1-31 or 39-793 or a fragment thereof, wherein said polypeptide is differentially expressed in cancer.

[0056] Some compositions and methods provided herein include an isolated agent that selectively binds to an isolated polypeptide consisting essentially of an amino acid sequence selected from the group consisting of a polypeptide comprising, consisting essentially of, or consisting of SEQ ID NOs:1-31 or 39-793 or a fragment thereof, wherein said polypeptide is differentially expressed in cancer. In some embodiments, the agent comprises an antibody or antigen-binding fragment thereof.

[0057] Some compositions and methods provided herein include an isolated agent that selectively binds to an isolated polypeptide consisting of an amino acid sequence selected from the group consisting of a polypeptide comprising, consisting essentially of, or consisting of SEQ ID NOs:1-31 or 39-793 or a fragment thereof, wherein said polypeptide is differentially expressed in cancer. In some embodiments, the agent comprises an antibody or antigen-binding fragment thereof.

### BRIEF DESCRIPTION OF DRAWINGS

[0058] FIG. 1 depicts the processing of gastrointestinal lavage fluid samples obtained from subjects prior to mass spectrometry analysis, as described in Example 4.

[0059] FIG. 2 depicts the processing of the same control sample six times to assess variation in key proteins. The results reflect that the methodology results in data showing little variation and thus, the method is highly reproducible, as described in Example 5.

[0060] FIG. 3 depicts a volcano plot of the intensity values prior to “roll up” of proteins in the gastrointestinal lavage fluid of subjects with pancreatic ductal adenocarcinoma in the head of the pancreas versus control, as described in Example 5.

[0061] FIG. 4 depicts a volcano plot of the intensity values after “roll up” of proteins in the gastrointestinal lavage fluid of subjects with pancreatic ductal adenocarcinoma in the head of the pancreas versus control, as described in Example 5.

### DETAILED DESCRIPTION

[0062] The present invention is based, at least in part, on the unexpected discovery that particular pancreatic cancer biomarkers, for example, proteins secreted from the pancreas or other non-pancreatic sources in the gastrointestinal tract, are found at modified levels, for example, at decreased or increased levels, in gastrointestinal lavage fluid or fecal matter of a subject having pancreatic cancer. Indeed, the inventors have identified that gastrointestinal lavage fluid or fecal matter provide a unique opportunity to assess the presence of pancreatic cancer in a non-invasive, rapid and efficient manner.

[0063] As a result, the present invention provides methods for diagnosing pancreatic cancer by assessing levels of pancreatic cancer biomarkers in gastrointestinal lavage fluid or fecal matter derived from a subject.

[0064] Moreover, the present invention is further predicated, at least in part, on the discovery that relative changes in the levels of proteins or polypeptides that originate from the pancreas, and other sources, compared to relative changes in the levels of particular proteins or polypeptides that originate from other gastrointestinal (GI) systems can be used to detect pancreatic cancer. Accordingly, the levels of particular proteins or polypeptides originating from non-pancreatic sources can be useful as control levels for assessing whether a subject is suffering from pancreatic cancer.

### DEFINITIONS

[0065] Unless otherwise defined herein, scientific and technical terms used in connection with the present invention shall have the meanings that are commonly understood by those of ordinary skill in the art. The meaning and scope of the terms should be clear. However, in the event of any latent ambiguity, definitions provided herein take precedent over any dictionary or extrinsic definition. Further, unless otherwise required by context, singular terms, for example, those characterized by “a” or “an”, shall include pluralities. In this application, the use of “or” means “and/or”, unless stated otherwise. Furthermore, the use of the term “including,” as well as other forms of the term, such as “includes” and “included”, is not limiting. Also, terms such as “element” or “component” encompass both elements and components comprising one unit and elements and components that comprise more than one unit unless specifically stated otherwise.

[0066] The term “comprising” as used herein is synonymous with “including,” “containing,” or “characterized by,” and is inclusive or open-ended and does not exclude additional, unrecited elements or method steps. As used herein “consisting essentially of” refers to a peptide or polypeptide which includes an amino acid sequence of the proteins provided herein, for example, SEQ ID NOs:1-793, along with additional amino acids at the carboxyl and/or amino terminal ends where the additional amino acids do not materially alter the ability of the peptide or polypeptide to be diagnostically useful for the relevant type or types of cancer. For example, in some embodiments, a peptide or polypeptide “consisting essentially of” a particular sequence may include an amino acid sequence of the proteins provided herein, for example SEQ ID NOs:1-793, along with no more than 1, no more than 2, no more than 3, no more than 4, no more than 5, no more than 6, no more than 7, no more than 8, no more than 9, or no more than 10 additional amino acid(s) at the carboxyl and/or amino terminal ends of a polypeptide provided herein, for example, one of SEQ ID NOs:1-793.

[0067] All numbers expressing quantities of ingredients, reaction conditions, and so forth used in the specification are to be understood as being modified in all instances by the term “about.” Accordingly, unless indicated to the contrary, the numerical parameters set forth herein are approximations that may vary depending upon the desired properties sought to be obtained. At the very least, and not as an attempt to limit the application of the doctrine of equivalents to the scope of any claims in any application claiming priority to the present application, each numerical parameter should be construed in light of the number of significant digits and ordinary rounding approaches.

[0068] As used herein, the term “subject” refers to human and non-human animals, including veterinary subjects. The term “non-human animal” includes all vertebrates, e.g., mammals and non-mammals, such as non-human primates, mice, rabbits, sheep, dog, cat, horse, cow, chickens, amphibians, and reptiles. In a preferred embodiment, the subject is a human.

[0069] The terms “cancer” or “tumor” are well known in the art and refer to the presence, e.g., in a subject, of cells possessing characteristics typical of cancer-causing cells, such as uncontrolled proliferation, immortality, metastatic potential, rapid growth and proliferation rate, and certain characteristic morphological features. Cancer cells are often in the form of a tumor, but such cells may exist alone within a subject, or may be non-tumorigenic cancer cells, such as leukemia cells. As used herein, the term “cancer” includes pre-malignant as well as malignant cancers.

[0070] As used herein, “pancreas” in reference to an organ refers to a collection of a plurality of cell types held together by connective tissue, such that the plurality of cells include but are not limited to acini calls, ductal cells and islet cells. The “acini” produce many of the enzymes, such as lipase, which are needed to digest food in the duodenum. The enzymes produced by the acini are carried to the duodenum by small channels called ducts. Typically, ductal cells are held in place by connective tissue in close proximity to vascular cells and nerve cells. Islets of Langerhans are typically embedded between exocrine acini units of the pancreas. Examples of islet endocrine cells are Alpha cells that secrete glucagon which counters the action of insulin while Beta cells secrete insulin, which helps control carbohydrate metabolism.

[0071] As used herein, a subject who is “afflicted with pancreatic cancer” is one who is clinically diagnosed with such a cancer by a qualified clinician (for example, by the methods of the present invention), or one who exhibits one or more signs or symptoms (for example, reduced levels of a pancreatic cancer biomarker in gastrointestinal lavage fluid or fecal matter) of such a cancer and is subsequently clinically diagnosed with such a cancer by a qualified clinician (for example, by the methods of the present invention). A non-human subject that serves as an animal model of pancreatic cancer may also fall within the scope of the term a subject “afflicted with pancreatic cancer.”

[0072] As used herein, the term “pancreatic cancer” refers to the art recognized disease and includes cancers that originate in the tissue that comprises a pancreas. In various embodiments, the pancreatic cancer is an exocrine pancreatic cancer, a pancreatic cystic neoplasm or a pancreatic endocrine tumor.

[0073] In a particular embodiment, the pancreatic cancer is an exocrine pancreatic cancer selected from the group consisting of pancreatic ductal adenocarcinoma (PDAC), adenosquamous carcinoma, squamous cell carcinoma, giant cell carcinoma, acinar cell carcinoma and small cell carcinoma.

[0074] In a particular embodiment, the pancreatic cancer is a ductal adenocarcinoma, e.g., resectable pancreatic ductal adenocarcinoma (PDAC), which arises within the exocrine component of the pancreas. As used herein, “adenocarcinoma” refers to a cancerous tumor as opposed to an “adenoma” which refers to a benign (non-cancerous) tumor made up of cells that form glands (collections of cells surrounding an empty space). As used herein, “pancreatic ductal adenocarcinoma cell” refers to a cancerous cell that had the capability to form or originated from the ductal lining of the pancreas. A pancreatic ductal adenocarcinoma cell may be found within the pancreas forming a gland, or found within any organ as a metastasized cell or found within the blood stream of lymphatic system. As used herein, “ductal cell”, in reference to a pancreas, refers to any cell that forms or has the capability to form or originated from the ductal lining of ducts within and exiting from the pancreas.

[0075] In another embodiment, the pancreatic cancer is a pancreatic endocrine tumor, also known as islet cell tumors, pancreas endocrine tumors (PETs) and pancreatic neuroendocrine tumors (PNETs), which arises from islet cells. In a particular embodiment, the pancreatic cancer is an endocrine pancreatic cancer selected from the group consisting of insulinomas (i.e., arising from insulin-producing cells), glucagonomas (i.e., arising from glucagon-producing cells), somatostatinomas (i.e., arising from somatostatin-making cells), gastrinomas (i.e., arising from a gastrin-producing cells), VIPomas (arising from vasoactive intestinal peptide-making cells) and non-secreting islet tumors of the pancreas.

[0076] As used herein, the term “pancreatic cancer biomarker” refers to a protein or non-proteinaceous substance which is differentially present in gastrointestinal lavage fluid or fecal matter in subjects afflicted with pancreatic cancer as compared to subjects without pancreatic cancer. In particular embodiments, the protein is derived from the pancreas. In other embodiments, the protein is derived from non-pancreatic sources in the gastrointestinal tract, e.g., the intestine. In various embodiments, the pancreatic cancer biomarker is a protein selected from the group consisting of SEQ ID NOs:1-31 or 39-793. In a particular embodiment, the pancreatic cancer biomarker is a protein selected from the group consisting of SEQ ID NOs:1-19, 47, 49, 55-58, 206, 726, 729, 780 or 793. As used herein, isoforms and mature forms of the proteins specifically identified herein are also intended to be encompassed by the methods of the present invention. In addition, fragments of the proteins specifically identified herein are also intended to be encompassed by the methods of the present invention. As used herein, the term “fragment” refers to a fragment of a protein that preserves at least the structure, e.g., a portion of the amino acid sequence, or at least one function, e.g., activity, of the protein from which it is derived.

[0077] Alternatively, the pancreatic cancer biomarker may refer to a non-proteinaceous substance. For example, the pancreatic cancer may be CA19-9. As used herein, CA19-9, also known as carbohydrate antigen 19-9, cancer antigen 19-9 or sialylated Lewis (a) antigen) is a tumor marker often assayed in serum or blood.

[0078] The “level” of pancreatic cancer biomarker, as used herein, refers to the level of the pancreatic cancer biomarker in gastrointestinal lavage fluid or fecal matter as determined using a method for the measurement of levels of protein or non-proteinaceous substances. Such methods include, for example, electrophoresis, capillary electrophoresis, high performance liquid chromatography (HPLC), thin layer chromatography (TLC), hyperdiffusion chromatography, fluid or gel precipitation reactions, absorption spectroscopy, a colorimetric assays, spectrophotometric assays, flow cytometry, immunodiffusion (single or double), solution phase assay, immunoelectrophoresis, Western blotting, radioimmunoassay (RIA), enzyme-linked immunosorbent assays (ELISAs), immunofluorescent assays, and electrochemiluminescence immunoassay (exemplified below), and the like. In a preferred embodiment, the level is determined using an ELISA based assay.

[0079] The term “sample” as used herein refers to a collection of similar fluids, cells, or tissues isolated from a subject, as well as fluids, cells, or tissues present within a subject. In preferred embodiments, the sample is a biological fluid containing a pancreatic cancer biomarker. Biological fluids are typically liquids at physiological temperatures and may include naturally occurring fluids present in, withdrawn from, expressed or otherwise extracted from a subject or biological source. Certain biological fluids derive from particular tissues, organs or localized regions and certain other biological fluids may be more globally or systemically situated in a subject or biological source. Examples of biological fluids include gastrointestinal lavage fluid, fecal matter, blood, serum and serosal fluids, plasma, semen, pancreatic fluid, bile, lymph, urine, cerebrospinal fluid, saliva, ocular fluids, cystic fluid, tear drops, sputum, mucosal secretions of the secretory tissues and organs, vaginal secretions, gynecological fluids, ascites fluids such as those associated with non-solid tumors, fluids of the pleural, pericardial, peritoneal, abdominal and other body cavities, fluids collected by bronchial lavage and the like. In a particular embodiment, the sample is gastrointestinal lavage fluid or fecal matter.

[0080] In certain embodiments, the sample is a biological fluid formed of a liquid solution contacted with a subject or biological source. In a particular embodiment, the sample is a gastrointestinal lavage fluid.

[0081] In one embodiment, the sample is removed or obtained from the subject, for example, according to the methods described herein. In another embodiment, the sample is present within the subject.

[0082] In some embodiments, only a portion of the sample is subjected to an assay for determining the level of the pancreatic cancer biomarker, or various portions of the sample are subjected to various assays for determining the level of the pancreatic cancer biomarker. Also, in many embodiments, the sample may be pre-treated by physical or chemical means prior to the assay. For example, in embodiments discussed in more detail in the Examples section, samples, for example, gastrointestinal lavage fluid samples, were subjected to centrifugation, extraction (e.g., chloroform extraction), precipitation (e.g., methanol, chloroform and/or water precipitation), and digestion (e.g., with trypsin) prior to assaying the samples for the pancreatic cancer biomarker protein. Such techniques serve to enhance the accuracy, reliability and reproducibility of the assays of the present invention.

[0083] The term “control sample,” as used herein, refers to any clinically relevant control sample, including, for example, a sample from a healthy subject not afflicted with pancreatic cancer, a sample from a subject having a less severe or slower progressing pancreatic cancer than the subject to be assessed, a sample from a subject having some other type of cancer or disease, and the like. A control sample may include a sample derived from one or more subjects. A control sample may also be a sample made at an earlier time point from the subject to be assessed. For example, the control sample could be a sample taken from the subject to be assessed before the onset of pancreatic cancer, at an earlier stage of disease, or before the administration of treatment or of a portion of treatment. The control sample may also be a sample from an animal model, or from a tissue or cell lines derived from the animal model, of the pancreatic cancer. The level of pancreatic cancer biomarker in a control sample that consists of a group of measurements may be determined based on any appropriate statistical measure, such as, for example, measures of central tendency including average, median, or modal values.

[0084] The term “control level” refers to an accepted or pre-determined level of pancreatic cancer biomarker which is used to compare with the level of pancreatic cancer biomarker in a sample derived from a subject. In one embodiment, the control level of pancreatic cancer biomarker is based on the level of pancreatic cancer biomarker in sample(s) from a subject(s) having slow disease progression. In another embodiment, the control level of pancreatic cancer biomarker is based on the level in a sample from a subject(s) having rapid disease progression. In another embodiment, the control level of pancreatic cancer biomarker is based on the level of pancreatic cancer biomarker in a sample(s) from an unaffected, i.e., non-diseased, subject(s), i.e., a subject who does not have pancreatic cancer. In yet another embodiment, the control level of pancreatic cancer biomarker is based on the level of pancreatic cancer biomarker in a sample from a subject(s) prior to the administration of a therapy for pancreatic cancer. In another embodiment, the control level of pancreatic cancer biomarker is based on the level of pancreatic cancer biomarker in a sample(s) from a subject(s) having pancreatic cancer that is not contacted with a test compound. In another embodiment, the control level of pancreatic cancer biomarker is based on the level of pancreatic cancer biomarker in a sample(s) from a subject(s) not having pancreatic cancer that is contacted with a test compound. In one embodiment, the control level of pancreatic cancer biomarker is based on the level of pancreatic cancer biomarker in a sample(s) from an animal model of pancreatic cancer, a cell, or a cell line derived from the animal model of pancreatic cancer.

[0085] In one embodiment, the control is a standardized control, such as, for example, a control which is predetermined using an average of the levels of pancreatic cancer biomarker from a population of subjects having no pancreatic cancer. In still other embodiments of the invention, a control level of pancreatic cancer biomarker is based on the level of pancreatic cancer biomarker in a non-cancerous sample(s) derived from the subject having pancreatic cancer.

[0086] As used herein, “a difference” between the level of pancreatic cancer biomarker in a sample from a subject (i.e., gastrointestinal lavage fluid) and the level of pancreatic cancer biomarker in a control sample refers broadly to any clinically relevant and/or statistically significant difference in the level of pancreatic cancer biomarker in the two samples. In an exemplary embodiment, the difference is determined as set forth in the Examples set forth below.

[0087] In other embodiments, the difference must be greater than the limits of detection of the method for determining the level of pancreatic cancer biomarker. It is preferred that the difference be at least greater than the standard error of the assessment method, and preferably a difference of at least about 2-, about 3-, about 4-, about 5-, about 6-, about 7-, about 8-, about 9-, about 10-, about 15-, about 20-, about 25-, about 100-, about 500-, about 1000-fold or greater than the standard error of the assessment method. The difference may be assessed by any appropriate comparison, including any appropriate parametric or nonparametric descriptive statistic or comparison. For example, “an increase” in the level of pancreatic cancer biomarker may refer to a level in a test sample, e.g., gastrointestinal lavage fluid, that is about two, and more preferably about three, about four, about five, about six, about seven, about eight, about nine, about ten or more times more than the level of pancreatic cancer biomarker in the control sample. An increase may also refer to a level in a test sample that is preferably at least about 1.5, and more preferably about two, about three, about four, about five or more standard deviations above the average level of pancreatic cancer biomarker in the control sample. Likewise, “a decrease” in the level of pancreatic cancer biomarker may refer to a level in a test sample that is preferably at least about two, and more preferably about three, about four, about five, about six, about seven, about eight, about nine, about ten or more times less than the level of pancreatic cancer biomarker in the control sample. A decrease may also refer to a level in a test sample that is preferably at least about 1.5, and more preferably about two, about three, about four, about five or more standard deviations below the average level of pancreatic cancer biomarker in the control sample.

### Biological Samples

[0088] As set forth herein, a sample for use in the methods of the present invention refers to a collection of similar fluids, cells, or tissues isolated from a subject, as well as fluids, cells, or tissues present within a subject. In preferred embodiments the sample is a biological fluid containing a pancreatic cancer biomarker protein. Examples of biological fluids include gastrointestinal lavage fluid, fecal matter, blood, serum and serosal fluids, plasma, semen, pancreatic fluid, bile, lymph, urine, cerebrospinal fluid, saliva, ocular fluids, cystic fluid, tear drops, sputum, mucosal secretions of the secretory tissues and organs, vaginal secretions, gynecological fluids, ascites fluids such as those associated with non-solid tumors, fluids of the pleural, pericardial, peritoneal, abdominal and other body cavities, fluids collected by bronchial lavage and the like.

[0089] In a particular embodiment, the sample is a biological fluid originating from the gastrointestinal tract (GI tract). As is well known in the art, the gastrointestinal tract includes the upper gastrointestinal tract and lower gastrointestinal tract. The upper gastrointestinal tract includes the oral or buccal cavity, esophagus, stomach and duodenum. The lower gastrointestinal tract includes the jejunum, ileum and the large intestine and the anus. The large intestine includes the appendix, cecum, colon, and rectum. Organs and tissues associated with the gastrointestinal tract include structures outside the gastrointestinal tract. Examples of such structures include accessory digestive organs such as salivary glands, e.g., parotid salivary glands, submandibular salivary glands, and sublingual salivary glands, pancreas, e.g., exocrine pancreas, gallbladder, bile duct, and liver. More examples of structures associated with the gastrointestinal tract and outside the gastrointestinal tract include the pancreatic duct, biliary tree, and bile duct.

[0090] In a particular embodiment, the biological sample is gastrointestinal lavage fluid. In some embodiments, a biological sample includes a gastrointestinal lavage fluid. Generally, a lavage fluid can be orally administered to a subject, the oral lavage fluid passes through the gastrointestinal tract of the subject, and the resulting gastrointestinal lavage fluid is collected from the subject. Alternative lavage methods include direct washing of the cavity with a lavage fluid during surgery or endoscopy or washing via the rectum by means of enemas or colonic irrigation. As noted above, gastrointestinal lavage fluid provides a cleaner sampling of the gastrointestinal tract than the examination of feces/stool samples. Gastrointestinal lavage fluids appear to mitigate variability related to food intake, type and digestive status.

[0091] Some embodiments described herein include analysis of a gastrointestinal lavage fluid for detecting a pancreatic cancer biomarker for screening, disease detection, diagnosis, prognosis, response to treatment, selection of treatment and personalized medicine for diseases and pathological conditions of the gastrointestinal tract or associated organs/tissues, such as pancreatic cancer.

### Methods for Obtaining a Gastrointestinal Lavage Fluid

[0092] In certain embodiments of the present invention, a gastrointestinal lavage fluid sample is obtained from a subject. For example, a gastrointestinal lavage fluid may be obtained as described in International Application No. PCT/US2011/051269, filed on Sep. 12, 2011 and entitled “NON-INVASIVE METHODS OF DETECTING PANCREATIC CANCER BIOMARKERS”, the entire contents of which are hereby incorporated by reference herein. Some methods of obtaining a gastrointestinal lavage fluid include orthograde colonic lavage. Orthograde lavage can include orally administering a lavage composition to a subject, for example, comprising 4 L of a polyethylene glycol/electrolyte solution (U.S. Patent Application Publication No. 20070298008, incorporated by reference in its entirety). Some methods of obtaining a gastrointestinal lavage fluid include antegrade lavage and retrograde lavage.

[0093] More methods of obtaining a gastrointestinal lavage fluid include oral administration of lavage compositions. Such lavage composition may include solutions of electrolytes, such as sodium, potassium and magnesium salts of sulfate, bicarbonate, chloride, phosphate or citrate. Some such compositions may also include polyethylene glycol, which can act as a non-absorbable osmotic agent. Generic compositions include polyethylene glycol with an electrolyte solution, optionally also including bisacodyl, or ascorbic acid, and compositions including sulfate salts such as sodium sulfate, magnesium sulfate, or potassium sulfate. In some embodiments, an oral lavage fluid can include magnesium citrate. In some embodiments, an oral lavage fluid can include sodium picosulfate. One example composition of an oral lavage solution comprising polyethylene glycol with an electrolyte solution is GOLYTELY (Braintree Labs. Inc.). GOLYTELY is formulated as follows: polyethylene glycol 59 g, sodium sulfate 5.68 g, sodium bicarbonate 1.69 g, sodium chloride 1.46 g, potassium chloride 0.745 g and water to make up one liter (Davis et al. (1980) Gastroenterology 78:991-995, incorporated by reference in its entirety). Ingestion of GOLYTELY produces a voluminous, liquid stool with minimal changes in the subject's water and electrolyte balance. Another example of an oral lavage composition comprising polyethylene glycol with an electrolyte solution is NULYTELY (Braintree Labs. Inc.). Another exemplary oral lavage composition is HALFLYTELY (Braintree Labs. Inc.) which includes polyethylene glycol with an electrolyte solution and bisacodyl. An exemplary oral lavage composition comprising sulfate salts, such as sodium sulfate, magnesium sulfate, or potassium sulfate is SUPREP (Braintree Labs. Inc.). An exemplary composition of an oral lavage solution comprising polyethylene glycol with an electrolyte solution and ascorbic acid is MOVIPREP (Salix Pharmaceuticals, Inc.).

[0094] Polyethylene glycol is effective as an oral lavage composition when large amounts of polyethylene glycol are administered in large volumes of a dilute salt solution. Usually about 250-400 g polyethylene glycol are administered to the subject in about 4 L of an electrolyte solution in water. Oral administration of polyethylene glycol can be used to produce a bowel movement over a period of time, e.g., overnight. The dose required will vary, but from about 10-100 g of polyethylene glycol in 8 oz. of water can be effective. A dose of from about 68-85 g of polyethylene glycol can be effective to produce an overnight bowel movement, without profuse diarrhea. A volume of a solution of polyethylene glycol in an isotonic fluid can be an effective amount of an osmotic laxative. Volumes from about 0.5 L to about 4 L can be effective. Preferably the effective volume is between about 1.5 L and about 2.5 L. Oral administration of 2 L of isotonic solution is effective.

[0095] More examples of oral lavage compositions include hypertonic solutions of non-phosphate salts with an osmotic laxative agent such as polyethylene glycol (U.S. Pat. App. No. 20090258090, incorporated by reference in its entirety). Mixtures of sulfate salts that omit phosphates, for example, effective amounts of one or more of the following sulfate salts Na₂SO₄, MgSO₄, and K₂SO₄ can be effective (e.g., SUPREP). Some embodiments include about 0.1 g to about 20.0 g Na₂SO₄, and from about 1.0 g to 10.0 g Na₂SO₄ may be useful. Dosage amounts of MgSO₄ from about 0.01 g to about 40.0 g can be effective. Doses of from about 0.1 g to about 20.0 g Na₂SO₄ may also be advantageously used, as well as dosages of 1.0 to 10.0 g. Dosage amounts of K₂SO₄ from about 0.01 g to about 20.0 g can be effective to produce purgation, and doses of from about 0.1 g to about 10.0 g and from about 0.5 g to about 5.0 g K₂SO₄ may also be useful. Addition of an osmotic laxative agent, such as polyethylene glycol (PEG) may improve the effectiveness of the above salt mixtures. Doses of PEG from about 1.0 g to about 100 g PEG are effective. Doses from about 10.0 g to about 50 g of PEG are also effective, as is a dose of about 34 g. For ease of administration, the above mixture of salts can be dissolved in a convenient volume of water. A volume of less than one liter of water can be well tolerated by most subjects. The mixture can be dissolved in any small volume of water, and volumes of between 100 and 500 ml are useful. The effective dose may be divided and administered to the patient in two or more administrations over an appropriate time period. Generally, administration of two doses of equal portions of the effective dose, separated by 6 to 24 hours, produces satisfactory purgation. Some embodiments include cessation of normal oral intake during a defined period before and during administration of an oral lavage composition.

[0096] Some lavage compositions include a laxative, such as bisacodyl. In some embodiments, a laxative can be co-administered to a subject with a lavage composition. As will be understood, such co-administration can include, for example, administration of a laxative up to several hours before administration of a lavage composition to a subject, administration of a laxative with the administration of a lavage composition to a subject, or administration of a laxative up to several hours after administration of a lavage composition to a subject. Examples of laxatives and their effective doses include Aloe, 250-1000 mg; Bisacodyl, about 5-80 mg; Casanthranol, 30-360 mg; Cascara aromatic fluid extract, 2-24 ml; Cascara sagrada bark, 300-4000 mg; Cascada sagrada extract, 300-2000 mg; Cascara sagrada fliuid extract, 0.5-5.0 ml; Castor oil, 15-240 ml; Danthron, 75-300 mg; Dehydrocholic Acid, 250-2000 mg; Phenolphthalein, 30-1000 mg; Sennosides A and B, 12-200 mg; and Picosulfate, 1-100 mg.

[0097] More examples of lavage compositions include aqueous solutions of concentrated phosphate salts. The aqueous phosphate salt concentrate produces an osmotic effect on the intra-luminal contents of the gastrointestinal tract. Evacuation of the bowel occurs with a large influx of water and electrolytes into the colon from the body. One exemplary composition comprises 480 g/L monobasic sodium phosphate and 180 g/L dibasic sodium phosphate in stabilized buffered aqueous solution (FLEET'S PHOSPHO-SODA, C. S. Fleet Co., Inc.). Subjects are typically required to take 2-3 oz doses of this composition, separated by a 3 to 12 hour interval for a total of 6 ounces (180 ml).

[0098] Gastrointestinal lavage fluid may be collected from a subject before, during, or after a medical or diagnostic procedure. In some embodiments, a subject may collect gastrointestinal lavage fluid, for example, using a receptacle such as a toilet insert which captures the fluid. Enzyme inhibitors and denaturants may be used to preserve the quality of the gastrointestinal lavage fluid. In some embodiments, the pH of the sample may be adjusted to help stabilize the samples. In some embodiments, gastrointestinal lavage fluid samples may be further treated to remove some or all solids and/or bacteria, such as by centrifugation or filtration. In some embodiments, the gastrointestinal tract may not be fully purged by administration of an oral lavage composition. For example, a portion of a complete dose of an oral lavage composition required to fully purge the gastrointestinal tract of a subject can be administered to the subject. In some embodiments, a gastrointestinal lavage fluid can comprise fecal matter. In more embodiments, fecal matter can comprise a gastrointestinal lavage fluid.

### Methods for Detecting Pancreatic Cancer Biomarkers

[0099] The level of pancreatic biomarker proteins in a sample obtained from a subject may be determined by any of a wide variety of techniques and methods, which transform the pancreatic biomarker proteins within the sample into a moiety that can be detected and quantified. Non-limiting examples of such methods include analyzing the sample using immunological methods for detection of proteins, protein purification methods, protein function or activity assays, nucleic acid hybridization methods, nucleic acid reverse transcription methods, and nucleic acid amplification methods, immunohistological, immunocytological, hybridization using immunofluorescence and/or immunoenzymatic, hydrometry, polarimetry, spectrophotometry (e.g., mass and NMR), chromatography (e.g., gas liquid, high performance liquid, and thin layer), immunoblotting, Western blotting, Northern blotting, electron microscopy, mass spectrometry, e.g., MALDI-TOF and SELDI-TOF, immunoprecipitations, immunofluorescence, immunohistochemistry, enzyme linked immunosorbent assays (ELISAs), e.g., amplified ELISA, quantitative blood based assays, e.g., serum ELISA, quantitative urine based assays, flow cytometry, Southern hybridizations, array analysis, and the like, and combinations or sub-combinations thereof. In some embodiments, nucleic acid encoding pancreatic cancer biomarker proteins may be detected using nucleic acid hybridization methods, such as Southern blotting, Northern blotting, or PCR.

[0100] Some embodiments of the methods and compositions provided herein include characterizing a pancreatic cancer biomarker in a sample, such as a sample obtained from the gastrointestinal tract, including a gastrointestinal lavage fluid and/or fecal sample. Characterizing a pancreatic cancer biomarker can include, for example, identifying a pancreatic cancer biomarker, detecting a pancreatic cancer biomarker, and/or quantifying a pancreatic cancer biomarker.

[0101] Some embodiments include identifying, determining the presence or absence of a pancreatic cancer biomarker, and/or quantifying a pancreatic cancer biomarker, wherein the pancreatic cancer biomarker comprises a peptide, polypeptide, protein and/or non-proteinaceous biological molecule.

[0102] As used in the present specification, the term “polypeptide” and “protein”, used interchangeably herein, refer to a polymer of amino acids without regard to the length of the polymer; thus, peptides, oligopeptides, and proteins are included within the definition of polypeptide. This term also includes wild-type polypeptides, as well as mutants, truncations, extensions, splice-variants, and other non-native forms of polypeptide that may be present. This term also includes forms of the foregoing that have been subject to enzymatic degradation by proteases or other mechanisms (enzymatic or non-enzymatic) in the subject. For example, a polypeptide may be subject to degradation by a protease to produce a polypeptide fragment of the polypeptide. The protease may be one that is expressed or increased in expression as a result of the health problem or disease of the gastrointestinal tract system. This term also does not specify or exclude chemical or post-expression/translational modifications of the polypeptides, although chemical or post-expression modifications of these polypeptides may be included or excluded as specific embodiments. Therefore, for example, modifications to polypeptides that include the covalent attachment of glycosyl groups (i.e., glycosylation), acetyl groups (i.e., acetylation), phosphate groups (phosphorylation, including, but not limited to, phosphorylation on serine, threonine and tyrosine groups), lipid groups and the like are expressly encompassed by the term polypeptide. Further, polypeptides with these modifications may be specified as individual species to be included or excluded. The natural or other chemical modifications, such as those listed in the examples above, can occur anywhere in a polypeptide, including the peptide backbone, the amino acid side-chains and the amino or carboxyl termini, and may be present in the same or varying degrees at several sites in a gastrointestinal tract polypeptide. Also, a gastrointestinal tract polypeptide may contain many types of modifications. Polypeptides may be branched, for example, as a result of ubiquitination, and they may be cyclic, with or without branching. Modifications include acetylation, acylation, ADP-ribosylation, amidation, covalent attachment of flavin, covalent attachment of a heme moiety, covalent attachment of a nucleotide or nucleotide derivative, covalent attachment of a lipid or lipid derivative, covalent attachment of phosphotidylinositol, cross-linking, cyclization, disulfide bond formation, demethylation, formylation of cysteine, formylation of pyroglutamate, formylation, gamma-carboxylation, glycosylation, GPI anchor formation, hydroxylation, iodination, methylation, myristoylation, oxidation, pegylation, proteolytic processing, phosphorylation, prenylation, racemization, selenoylation, sulfation, transfer-RNA mediated addition of amino acids to proteins such as arginylation, and ubiquitination (see, for instance Creighton, (1993), Posttranslational Covalent Modification of Proteins, W. H. Freeman and Company, New York B. C. Johnson, Ed., Academic Press, New York 1-12; Seifier, et al., (1990) Meth Enzymol 182:626-646; Rattan et al, (1992) Ann NY Acad Sci 663:48-62). Isoforms of the proteins disclosed herein are also intended to be encompassed by the methods of the present invention.

[0103] Such pancreatic cancer biomarkers may be characterized by a variety of methods such as immunoassays, including radioimmunoassays, enzyme-linked immunoassays and two-antibody sandwich assays as described herein. A variety of immunoassay formats, including competitive and non-competitive immunoassay formats, antigen capture assays and two-antibody sandwich assays also are useful (Self and Cook, (1996) Curr. Opin. Biotechnol. 7:60-65, incorporated by reference in its entirety). Some embodiments include one or more antigen capture assays. In an antigen capture assay, antibody is bound to a solid phase, and sample is added such that antigen, e.g., a pancreatic cancer biomarker in a fluid or tissue sample, is bound by the antibody. After unbound proteins are removed by washing, the amount of bound antigen can be quantitated, if desired, using, for example, a radioassay (Harlow and Lane, (1988) Antibodies A Laboratory Manual Cold Spring Harbor Laboratory: New York, incorporated by reference in its entirety). Immunoassays can be performed under conditions of antibody excess, or as antigen competitions, to quantitate the amount of antigen and, thus, determine a level of a pancreatic cancer biomarker in a sample

[0104] Enzyme-linked immunosorbent assays (ELISAs) can be useful in certain embodiments provided herein. An enzyme such as horseradish peroxidase (HRP), alkaline phosphatase (AP), β-galactosidase or urease can be linked, for example, to an anti-HMGB1 antibody or to a secondary antibody for use in a method of the invention. A horseradish-peroxidase detection system can be used, for example, with the chromogenic substrate tetramethylbenzidine (TMB), which yields a soluble product in the presence of hydrogen peroxide that is detectable at 450 nm. Other convenient enzyme-linked systems include, for example, the alkaline phosphatase detection system, which can be used with the chromogenic substrate p-nitrophenyl phosphate to yield a soluble product readily detectable at 405 nm. Similarly, a β-galactosidase detection system can be used with the chromogenic substrate o-nitrophenyl-β-D-galactopyranoside (ONPG) to yield a soluble product detectable at 410 nm, or a urease detection system can be used with a substrate such as urea-bromocresol purple (Sigma Immunochemicals). Useful enzyme-linked primary and secondary antibodies can be obtained from a number of commercial sources such as Jackson Immuno-Research (West Grove, Pa.), as described further herein.

[0105] In certain embodiments, a pancreatic cancer biomarker in a sample, such as a sample obtained from the gastrointestinal tract, for example a gastrointestinal lavage fluid or fecal matter, can be detected and/or measured using chemiluminescent detection. For example in certain embodiments, specific antibodies to a particular pancreatic cancer biomarker are used to capture the pancreatic cancer biomarker present in the biological sample, e.g., such as a sample obtained from the gastrointestinal tract, for example, a gastrointestinal lavage fluid or fecal matter, and an antibody specific for the pancreatic cancer biomarker-specific antibodies and labeled with an chemiluminescent label is used to detect the pancreatic cancer biomarker present in the sample. Any chemiluminescent label and detection system can be used in the present methods. Chemiluminescent secondary antibodies can be obtained commercially from various sources such as Amersham. Methods of detecting chemiluminescent secondary antibodies are known in the art.

[0106] Fluorescent detection also can be useful for detecting a pancreatic cancer biomarker in certain methods provided herein. Useful fluorochromes include DAPI, fluorescein, Hoechst 33258, R-phycocyanin, B-phycoerythrin, R-phycoerythrin, rhodamine, Texas red and lissamine. Fluorescein or rhodamine labeled antibodies, or fluorescein- or rhodamine-labeled secondary antibodies.

[0107] Radioimmunoassays (RIAs) also can be useful in certain methods provided herein. Radioimmunoassays can be performed, for example, with ¹²⁵I-labeled primary or secondary antibody (Harlow and Lane, (1988) Antibodies A Laboratory Manual Cold Spring Harbor Laboratory: New York, incorporated by reference in its entirety).

[0108] A signal from a detectable reagent can be analyzed, for example, using a spectrophotometer to detect color from a chromogenic substrate; a radiation counter to detect radiation, such as a gamma counter for detection of ¹²⁵I; or a fluorometer to detect fluorescence in the presence of light of a certain wavelength. Where an enzyme-linked assay is used, quantitative analysis of the amount of a pancreatic cancer biomarker can be performed using a spectrophotometer such as an EMAX Microplate Reader (Molecular Devices; Menlo Park, Calif.) in accordance with the manufacturer's instructions. The assays of the invention can be automated or performed robotically, if desired, and that the signal from multiple samples can be detected simultaneously.

[0109] In some embodiments, capillary electrophoresis based immunoassays (CEIA), which can be automated if desired, may be used to detect and/or measure the pancreatic cancer biomarker. Immunoassays also can be used in conjunction with laser-induced fluorescence as described, for example, in Schmalzing and Nashabeh, Electrophoresis 18:2184-93 (1997), and Bao, J. Chromatogr. B. Biomed. Sci. 699:463-80 (1997), each incorporated by reference in its entirety. Liposome immunoassays, such as flow-injection liposome immunoassays and liposome immunosensors, also can be used to detect pancreatic cancer biomarkers or to determine a level of a pancreatic cancer biomarker according to certain methods provided herein (Rongen et al., (1997) J. Immunol. Methods 204:105-133, incorporated by reference in its entirety).

[0110] Sandwich enzyme immunoassays also can be useful in certain embodiments. In a two-antibody sandwich assay, a first antibody is bound to a solid support, and the antigen is allowed to bind to the first antibody. The amount of a pancreatic cancer biomarker is quantitated by measuring the amount of a second antibody that binds to it.

[0111] In an exemplary sandwich assay, an agent that selectively binds to a pancreatic cancer biomarker can be immobilized on a solid support. A capture reagent can be chosen to directly bind the pancreatic cancer biomarker or indirectly bind the pancreatic cancer biomarker by binding with an ancillary specific binding member which is bound to the pancreatic cancer biomarker. In addition, the capture reagent may be immobilized on the solid phase before or during the performance of the assay by means of any suitable attachment method. Typically, the capture site of the present invention is a delimited or defined portion of the solid phase such that the specific binding reaction of the capture reagent and analyte is localized or concentrated in a limited site, thereby facilitating the detection of label that is immobilized at the capture site in contrast to other portions of the solid phase. In a related embodiment, the capture reagent can be applied to the solid phase by dipping, inscribing with a pen, dispensing through a capillary tube, or through the use of reagent jet-printing or other techniques. In addition, the capture zone can be marked, for example, with a dye, such that the position of the capture zone upon the solid phase can be visually or instrumentally determined even when there is no label immobilized at the site.

[0112] Another exemplary embodiment of a sandwich assay format includes methods wherein a sample is mixed with a labeled first specific binding pair member for the pancreatic cancer biomarker and allowed to traverse a lateral flow matrix, past a series of spatially separated capture zones located on the matrix (See e.g., U.S. Pat. No. 7,491,551, incorporated by reference in its entirety). The sample may be mixed with the labeled first specific binding pair member prior to addition of the sample to the matrix. Alternatively, the labeled first specific binding pair member may be diffusively bound on the matrix on a labeling zone at a point upstream of the series of capture zones. Optionally, the sample is added directly to the labeling zone. Preferably, the sample is added to a sample receiving zone on the matrix at a point upstream of the labeling zone and allowed to flow through the labeling zone. The labeled first specific binding pair member located within the labeling zone is capable of being freely suspendible in the sample. Therefore, if analyte is present in the sample, the labeled first specific binding pair member will bind to the pancreatic cancer biomarker and the resulting pancreatic cancer biomarker-labeled first specific binding pair member complex will be transported to and through the capture zones. The extent of complex formation between the pancreatic cancer biomarker and the labeled specific binding pair member is directly proportional to the amount of pancreatic cancer biomarker present in the sample. A second specific binding pair member capable of binding to the pancreatic cancer biomarker-first specific binding pair member complex is immobilized on each of the capture zones. This second specific binding pair member is not capable of binding the labeled specific binding pair member unless the labeled specific binding pair member is bound to the pancreatic cancer biomarker. Thus, the amount of labeled specific binding pair member that accumulates on the capture zones is directly proportional to the amount of pancreatic cancer biomarker present in the sample.

[0113] In some embodiments, an assay includes the use of binding agent immobilized on a solid support to bind to and remove a target polypeptide from the remainder of the sample. The bound target polypeptide may then be detected using a detection reagent that contains a reporter group and specifically binds to the binding agent/polypeptide complex. Such detection reagents may comprise, for example, a binding agent that specifically binds to the target polypeptide or an antibody or other agent that specifically binds to the binding agent, such as an anti-immunoglobulin, protein G, protein A or a lectin. In such embodiments, the binding agent can comprise an antibody or antigen-binding fragment thereof specific to a polypeptide or fragment thereof descried herein. Alternatively, a competitive assay may be utilized in which a polypeptide is labeled with a reporter group and allowed to bind to the immobilized binding agent after incubation of the binding agent with the sample. The extent to which components of the sample inhibit the binding of the labeled polypeptide to the binding agent is indicative of the reactivity of the sample with the immobilized binding agent. Suitable polypeptides for use within such assays include full length proteins provided herein and polypeptide portions thereof such as SEQ ID NOs:1-793, for example, SEQ ID NOs:1-19, 47, 49-58, 206, 726, 729, 780 or 793, to which the binding agent binds.

[0114] The solid support may be any material known to those of ordinary skill in the art to which the binding agent may be attached. For example, the solid support may be a test well in a microtiter plate or a nitrocellulose or other suitable membrane or flow-through format or test strip. Alternatively, the support may be a bead or disc, such as glass, fiberglass, latex or a plastic material such as polystyrene or polyvinylchloride. The support may also be a magnetic particle or a fiber optic sensor, such as those disclosed, for example, in U.S. Pat. No. 5,359,681. The binding agent may be immobilized on the solid support using a variety of techniques known to those of skill in the art, which are amply described in the patent and scientific literature. In the context of the present invention, the term “immobilization” refers to both noncovalent association, such as adsorption, and covalent attachment (which may be a direct linkage between the agent and functional groups on the support or may be a linkage by way of a cross-linking agent). Immobilization by adsorption to a well in a microtiter plate or to a membrane is preferred. In such cases, adsorption may be achieved by contacting the binding agent, in a suitable buffer, with the solid support for a suitable amount of time. The contact time varies with temperature, but is typically between about 1 hour and about 1 day. In general, contacting a well of a plastic microtiter plate (such as polystyrene or polyvinylchloride) with an amount of binding agent ranging from about 10 ng to about 10 μg, and preferably about 100 ng to about 1 μg, is sufficient to immobilize an adequate amount of binding agent.

[0115] Covalent attachment of binding agent to a solid support may generally be achieved by first reacting the support with a bifunctional reagent that will react with both the support and a functional group, such as a hydroxyl or amino group, on the binding agent. For example, the binding agent may be covalently attached to supports having an appropriate polymer coating using benzoquinone or by condensation of an aldehyde group on the support with an amine and an active hydrogen on the binding partner (see, e.g., Pierce Immunotechnology Catalog and Handbook, 1991, at A12-A13).

[0116] In certain embodiments, the assay is a two-antibody sandwich assay. This assay may be performed by first contacting an antibody that has been immobilized on a solid support, commonly the well of a microtiter plate, with the sample, such that target polypeptides within the sample are allowed to bind to the immobilized antibody. Unbound sample is then removed from the immobilized polypeptide-antibody complexes and a detection reagent (preferably a second antibody capable of binding to a different site on the polypeptide) containing a reporter group is added. The amount of detection reagent that remains bound to the solid support is then determined using a method appropriate for the specific reporter group.

[0117] More specifically, once the antibody is immobilized on the support as described above, the remaining protein binding sites on the support are typically blocked. Any suitable blocking agent known to those of ordinary skill in the art may be used, such as bovine serum albumin or TWEEN 20. (Sigma Chemical Co., St. Louis, Mo.). The immobilized antibody is then incubated with the sample, and target polypeptide is allowed to bind to the antibody. The sample may be diluted with a suitable diluent, such as phosphate-buffered saline (PBS) prior to incubation. In general, an appropriate contact time (i.e., incubation time) is a period of time that is sufficient to detect the presence of target polypeptide within a sample obtained from an individual with breast cancer. Preferably, the contact time is sufficient to achieve a level of binding that is at least about 95% of that achieved at equilibrium between bound and unbound polypeptide. Those of ordinary skill in the art will recognize that the time necessary to achieve equilibrium may be readily determined by assaying the level of binding that occurs over a period of time. At room temperature, an incubation time of about 30 minutes is generally sufficient.

[0118] Unbound sample may then be removed by washing the solid support with an appropriate buffer, such as PBS containing 0.1% TWEEN 20. The second antibody, which contains a reporter group, may then be added to the solid support. Reporter groups are well known in the art. The detection reagent is then incubated with the immobilized antibody-polypeptide complex for an amount of time sufficient to detect the bound detection reagent. An appropriate amount of time may generally be determined by assaying the level of binding that occurs over a period of time. Unbound detection reagent is then removed and bound detection reagent is detected using the reporter group. The method employed for detecting the reporter group depends upon the nature of the reporter group. For radioactive groups, scintillation counting or autoradiographic methods are generally appropriate. Spectroscopic methods may be used to detect dyes, luminescent groups and fluorescent groups. Biotin may be detected using avidin, coupled to a different reporter group (commonly a radioactive or fluorescent group or an enzyme). Enzyme reporter groups may generally be detected by the addition of substrate (generally for a specific period of time), followed by spectroscopic or other analysis of the reaction products.

[0119] To determine the level of a polypeptide described herein e.g., SEQ ID NOs:1-793 and, in particular, SEQ ID NOs: 1-19, 47, 49-58, 206, 726, 729, 780 or 793, the signal detected from the reporter group that remains bound to the solid support is generally compared to a signal that corresponds to a predetermined cut-off value. In one embodiment, the cut-off value for the detection of a cancer is the average mean signal obtained when the immobilized antibody is incubated with samples from patients without the cancer. In general, a sample generating a signal that is three standard deviations above or below the predetermined cut-off value is considered positive for the cancer. For example, an increased level of certain polypeptides described herein e.g., SEQ ID NOs:17-19, 47, 726, 729 or 780, may be indicative of the presence of cancer or the stage of cancer, such as pancreatic cancer. Similarly, a reduced level of certain polypeptides described herein e.g., SEQ ID NOs:1-16, 49, 55-58, 206 or 793, may be indicative of the presence of cancer or the stage of cancer. In some embodiments, the cut-off value is determined using a Receiver Operator Curve, according to the method of Sackett et al., Clinical Epidemiology: A Basic Science for Clinical Medicine, Little Brown and Co., 1985, p. 106-7. Briefly, in this embodiment, the cut-off value may be determined from a plot of pairs of true positive rates (i.e., sensitivity) and false positive rates (100%-specificity) that correspond to each possible cut-off value for the diagnostic test result. The cut-off value on the plot that is the closest to the upper left-hand corner (i.e., the value that encloses the largest area) is the most accurate cut-off value, and a sample generating a signal that is higher than the cut-off value determined by this method may be considered positive. Alternatively, the cut-off value may be shifted to the left along the plot, to minimize the false positive rate, or to the right, to minimize the false negative rate.

[0120] In a related embodiment, the assay is performed in a flow-through or test strip format, wherein the binding agent is immobilized on a membrane, such as nitrocellulose. In the flow-through test, target polypeptides within the sample bind to the immobilized binding agent as the sample passes through the membrane. A second labeled binding agent then binds to the binding agent-polypeptide complex as a solution containing the second binding agent flows through the membrane. The detection of bound second binding agent may then be performed as described herein. In the test strip format, one end of the membrane to which binding agent is bound is immersed in a solution containing the sample. The sample migrates along the membrane through a region containing second binding agent and to the area of immobilized binding agent. The amount of immobilized antibody indicates the presence, or absence or progression or stage of a cancer. Typically, the concentration of second binding agent at that site generates a pattern, such as a line, that can be read visually. In general, the amount of binding agent immobilized on the membrane is selected to generate a visually discernible pattern when the biological sample contains a level of polypeptide that would be sufficient to generate a positive signal in the two-antibody sandwich assay, in the format discussed above. Preferred binding agents for use in such assays are antibodies and antigen-binding fragments thereof. Preferably, the amount of antibody immobilized on the membrane ranges from about 25 ng to about 1 μg, and more preferably from about 50 ng to about 500 ng. Such tests can typically be performed with a very small amount of biological sample.

[0121] Quantitative Western blotting also can be used to detect a pancreatic cancer biomarker or to determine a level of pancreatic cancer biomarker in a method provided herein. Western blots can be quantitated by well known methods such as scanning densitometry. As an example, protein samples are electrophoresed on 10% SDS-PAGE Laemmli gels. Primary murine monoclonal antibodies, for example, against a pancreatic cancer biomarker are reacted with the blot, and antibody binding confirmed to be linear using a preliminary slot blot experiment. Goat anti-mouse horseradish peroxidase-coupled antibodies (BioRad) are used as the secondary antibody, and signal detection performed using chemiluminescence, for example, with the Renaissance chemiluminescence kit (New England Nuclear; Boston, Mass.) according to the manufacturer's instructions. Autoradiographs of the blots are analyzed using a scanning densitometer (Molecular Dynamics; Sunnyvale, Calif.) and normalized to a positive control. Values are reported, for example, as a ratio between the actual value to the positive control (densitometric index). Such methods are described, for example, in Parra et al., J. Vasc. Surg. 28:669-675 (1998), incorporated herein by reference in its entirety.

[0122] As described herein, immunoassays including, for example, enzyme-linked immunosorbent assays, radioimmunoassays and quantitative western analysis, can be useful in some embodiments for detecting a pancreatic cancer biomarker or determining a level of a pancreatic cancer biomarker. Such assays typically rely on one or more antibodies. As would be understood by the skilled artisan, methods described herein can be used to readily distinguish proteins with alternative forms of post-translation modifications, e.g., phosphorylated proteins, and glycosylated proteins.

[0123] Some embodiments of the methods and compositions provided herein include generating agents that selectively bind to pancreatic cancer biomarkers. In some embodiments, such agents include an antibody or antigen-binding fragment thereof. Methods of generating polyclonal antibodies and monoclonal antibodies are well known in the art. The antibodies or active fragments thereof may be obtained by methods known in the art for production of antibodies or functional portions thereof. Such methods include, but are not limited to, separating B cells with cell-surface antibodies of the desired specificity, cloning the DNA expressing the variable regions of the light and heavy chains and expressing the recombinant genes in a suitable host cell. Standard monoclonal antibody generation techniques can be used wherein the antibodies are obtained from immortalized antibody-producing hybridoma cells. These hybridomas can be produced by immunizing animals with HSCs or progeny thereof, and fusing B lymphocytes from the immunized animals, preferably isolated from the immunized host spleen, with compatible immortalized cells, preferably a B cell myeloma.

[0124] In embodiments where the pancreatic cancer biomarker is a polypeptide associated with one or more iron atoms, antibodies which differentially bind to the iron-associated polypeptide relative to the same polypeptide without iron can be prepared. Antibodies which differentially bind to metal-associated polypeptides relative to the same polypeptide without metal and methods for making such antibodies have been described, for example, in HALLAB, et al., In vitro Reactivity to Implant Metals Demonstrates a Person Dependent Association with both T-Cell and B-Cell Activation, J. Biomed Mater Res A, 2010 February; 92(2):667-682; KONG, et al., Preparation of specific monoclonal antibodies against chelated copper ions, Biol Trace Elem Res., 2012 March; 145(3):388-395; LIU, et al., Preparation and characterization of monoclonal antibody specific for copper-chelate complex, J Immunol Methods., 2013 Jan. 31; 387(1-2):228-236; XIANG, et al., A competitive indirect enzyme-linked immunoassay for lead ion measurement using mAbs against the lead-DTPA complex, Environ Pollut., 2010 May; 158(5):1376-1380; YANG, et al., Detection of antibodies against corrosion products in patients after Co—Cr total joint replacements, J Biomed Mater Res., 1994 November; 28(11):1249-1258; ZHANG, et al., Development of ELISA for detection of mercury based on specific monoclonal antibodies against mercury-chelate, Biol Trace Elem Res., 2011 December; 144(1-3):854-864; and ZHU, et al., Preparation of specific monoclonal antibodies (MAbs) against heavy metals: MAbs that recognize chelated cadmium ions, J Agric Food Chem., 2007 Sep. 19; 55(19):7648-7653, each of which is incorporated by reference in its entirety.

[0125] Pancreatic cancer biomarkers, such as protein pancreatic cancer biomarkers, can be characterized, isolated, purified, or obtained for use in generating antibodies by a variety of methods. Proteins, polypeptides and peptides can be isolated by a variety of methods well known in the art, such as protein precipitation, chromatography (e.g., reverse phase chromatography, size exclusion chromatography, ion exchange chromatography, liquid chromatography), affinity capture, and differential extractions.

[0126] Isolated proteins can undergo enzymatic digestion or chemical cleavage to yield polypeptide fragments and peptides. Such fragments can be identified and quantified. A particularly useful method for analysis of polypeptide/peptide fragments and other pancreatic cancer biomarkers is mass spectrometry (U.S. Pat. App. No. 20100279382, incorporated by reference in its entirety). A number of mass spectrometry-based quantitative proteomics methods have been developed that identify the proteins contained in each sample and determine the relative abundance of each identified protein across samples (Flory et al., Trends Biotechnol. 20:S23-29 (2002); Aebersold, J. Am. Soc. Mass Spectrom. 14:685-695 (2003); Aebersold, J. Infect. Dis. 187 Suppl 2:S315-320 (2003); Patterson and Aebersold, Nat. Genet. 33 Suppl, 311-323 (2003); Aebersold and Mann, Nature 422:198-207 (2003); Aebersold, R. and Cravatt, Trends Biotechnol. 20:S1-2 (2002); Aebersold and Goodlett, Chem. Rev. 101, 269-295 (2001); Tao and Aebersold, Curr. Opin. Biotechnol. 14:110-118 (2003), each incorporated by reference in its entirety). Generally, the proteins in each sample are labeled to acquire an isotopic signature that identifies their sample of origin and provides the basis for accurate mass spectrometric quantification. Samples with different isotopic signatures are then combined and analyzed, typically by multidimensional chromatography tandem mass spectrometry. The resulting collision induced dissociation (CID) spectra are then assigned to peptide sequences and the relative abundance of each detected protein in each sample is calculated based on the relative signal intensities for the differentially isotopically labeled peptides of identical sequence.

[0127] More techniques for identifying and quantifying pancreatic cancer biomarkers include label-free quantitative proteomics methods. Such methods include: (i) sample preparation including protein extraction, reduction, alkylation, and digestion; (ii) sample separation by liquid chromatography (LC or LC/LC) and analysis by MS/MS; (iii) data analysis including peptide/protein identification, quantification, and statistical analysis. Each sample can be separately prepared, then subjected to individual LC-MS/MS or LC/LC-MS/MS runs (Zhu W. et al., J. of Biomedicine and Biotech. (2010) Article ID 840518, 6 pages, incorporated by reference in its entirety). An exemplary technique includes LC-MS in which the mass of a peptide coupled with its corresponding chromatographic elution time as peptide properties that uniquely define a peptide sequence, a method termed the accurate mass and time (AMT) tag approach. Using LC coupled with Fourier transform ion cyclotron resonance (LC-FTICR) MS to obtain the chromatographic and high mass accuracy information, peptide sequences can be identified by matching the AMT tags to previously acquired LC-MS/MS sequence information stored in a database. By taking advantage of the observed linear correlation between peak area of measured peptides and their abundance, these peptides can be relatively quantified by the signal intensity ratio of their corresponding peaks compared between MS runs (Tang, K., et al., (2004) J. Am. Soc. Mass Spectrom. 15:1416-1423; and Chelius, D. and Bondarenko, P. V. (2002) J. Proteome Res. 1: 317-323, incorporated by reference in their entireties). Statistics tools such as the Student's t-test can be used to analyse data from multiple LC-MS runs for each sample (Wiener, M. C., et al., (2004) Anal. Chem. 76:6085-6096, incorporated by reference in its entirety). At each point of acquisition time and m/z, the amplitudes of signal intensities from multiple LC-MS runs can be compared between two samples to detect peptides with statistically significant differences in abundance between samples.

[0128] As will be understood, a variety of mass spectrometry systems can be employed in the methods for identifying and/or quantifying a polypeptide/peptide fragments. Mass analyzers with high mass accuracy, high sensitivity and high resolution include ion trap, triple quadrupole, and time-of-flight, quadrupole time-of-flight mass spectrometeres and Fourier transform ion cyclotron mass analyzers (FT-ICR-MS). Mass spectrometers are typically equipped with matrix-assisted laser desorption (MALDI) or electrospray ionization (ESI) ion sources, although other methods of peptide ionization can also be used. In ion trap MS, analytes are ionized by ESI or MALDI and then put into an ion trap. Trapped ions can then be separately analyzed by MS upon selective release from the ion trap. Fragments can also be generated in the ion trap and analyzed. Sample molecules such as released polypeptide/peptide fragments can be analyzed, for example, by single stage mass spectrometry with a MALDI-TOF or ESI-TOF system. Methods of mass spectrometry analysis are well known to those skilled in the art (see, e.g., Yates, J. (1998) Mass Spect. 33:1-19; Kinter and Sherman, (2000) Protein Sequencing and Identification Using Tandem Mass. Spectrometry, John Wiley & Sons, New York; and Aebersold and Goodlett, (2001) Chem. Rev. 101:269-295, each incorporated by reference in its entirety).

[0129] For high resolution polypeptide fragment separation, liquid chromatography ESI-MS/MS or automated LC-MS/MS, which utilizes capillary reverse phase chromatography as the separation method, can be used (Yates et al., Methods Mol. Biol. 112:553-569 (1999), incorporated by reference in its entirety). Data dependent collision-induced dissociation (CID) with dynamic exclusion can also be used as the mass spectrometric method (Goodlett, et al., Anal. Chem. 72:1112-1118 (2000), incorporated by reference in its entirety).

[0130] Once a peptide is analyzed by MS/MS, the resulting CID spectrum can be compared to databases for the determination of the identity of the isolated peptide. Methods for protein identification using single peptides have been described previously (Aebersold and Goodlett, Chem. Rev. 101:269-295 (2001); Yates, J. Mass Spec. 33:1-19 (1998), David N. et al., Electrophoresis, 20 3551-67 (1999), each incorporated by reference in its entirety). In particular, it is possible that one or a few peptide fragments can be used to identify a parent polypeptide from which the fragments were derived if the peptides provide a unique signature for the parent polypeptide. Moreover, identification of a single peptide, alone or in combination with knowledge of a site of glycosylation, can be used to identify a parent glycopolypeptide from which the glycopeptide fragments were derived. As will be understood, methods that include MS can be used to characterize proteins, fragments thereof, as well as other types of pancreatic cancer biomarkers described herein.

[0131] In some embodiments, pancreatic cancer biomarkers include nucleic acids. Nucleic acids can encode a polypeptide or fragment thereof useful to determine the presence or absence of a cancer. As such, pancreatic cancer biomarkers include nucleic acid molecules sufficient for use as hybridization probes to identify nucleic acid molecules that correspond to a pancreatic cancer biomarker, including nucleic acids which encode a polypeptide corresponding to a pancreatic cancer biomarkers, and fragments of such nucleic acid molecules, e.g., those suitable for use as PCR primers for the amplification or mutation of nucleic acid molecules. As used herein, the term “nucleic acid molecule” is intended to include DNA molecules (e.g., cDNA or genomic DNA) and RNA molecules (e.g., mRNA) and analogs of the DNA or RNA generated using nucleotide analogs. The nucleic acid molecule can be single-stranded or double-stranded, but preferably is double-stranded DNA.

[0132] A nucleic acid pancreatic cancer biomarker can be amplified using cDNA, mRNA, or genomic DNA as a template and appropriate oligonucleotide primers according to standard PCR amplification techniques. The nucleic acid so amplified can be cloned into an appropriate vector and characterized by DNA sequence analysis. Furthermore, oligonucleotides corresponding to all or a portion of a nucleic acid pancreatic cancer biomarker can be prepared by standard synthetic techniques, e.g., using an automated DNA synthesizer.

[0133] In another preferred embodiment, a nucleic acid pancreatic cancer biomarker comprises a nucleic acid molecule that has a nucleotide sequence complementary to a nucleic acid which is differentially expressed in cancer or a fragment thereof. For example, the pancreatic cancer biomarker may comprise a nucleic acid encoding a polypeptide of any one of SEQ ID NOs:1-31 or 39-793, for example, SEQ ID NOs:1-19, 47, 49-58, 206, 726, 729, 780 or 793, or a fragment comprising at least 10, at least 20, at least 30, at least 40, at least 50 or more consecutive nucleotides thereof. A nucleic acid molecule which is complementary to a pancreatic cancer biomarker nucleotide sequence is one which is sufficiently complementary to the pancreatic cancer biomarker nucleotide sequence that it can hybridize to the pancreatic cancer biomarker nucleotide sequence thereby forming a stable duplex.

[0134] In some embodiments, a fragment of a polynucleotide sequence will be understood to include any nucleotide fragment having, for example, at least about 5 successive nucleotides, at least about 12 successive nucleotides, at least about 15 successive nucleotides, at least about 18 successive nucleotides, or at least about 20 successive nucleotides of the sequence from which it is derived. An upper limit for a fragment can include, for example, the total number of nucleotides in a full-length sequence encoding a particular polypeptide. A fragment of a polypeptide sequence will be understood to include any polypeptide fragment having, for example, at least about 5 successive residues, at least about 12 successive residues, at least about 15 successive residues, at least about 18 successive residues, or at least about 20 successive residues of the sequence from which it is derived. An upper limit for a fragment can include, for example, the total number of residues in a full-length sequence of a particular polypeptide.

[0135] Moreover, a nucleic acid pancreatic cancer biomarker can comprise all or only a portion of a nucleic acid sequence which is differentially expressed in cancer. For example, the pancreatic cancer biomarker may comprise a nucleic acid encoding a polypeptide of SEQ ID NOs:1-31 or 39-793, for example, SEQ ID NOs:1-19, 47, 49-58, 206, 726, 729, 780 or 793, or a fragment comprising at least 10, at least 20, at least 30, at least 40, at least 50 or more consecutive nucleotides thereof. Such nucleic acids can be used, for example, as a probe or primer. The probe/primer typically is used as one or more substantially purified oligonucleotides. The oligonucleotide typically comprises a region of nucleotide sequence that hybridizes under stringent conditions to at least about 7, preferably about 15, more preferably about 25, 50, 75, 100, 125, 150, 175, 200, 250, 300, 350, or 400 or more consecutive nucleotides of a nucleic acid.

[0136] Probes based on the sequence of a nucleic acid pancreatic cancer biomarker can be used to detect transcripts or genomic sequences corresponding to one or more pancreatic cancer biomarkers. The probe comprises a label group attached thereto, e.g., a radioisotope, a fluorescent compound, an enzyme, or an enzyme co-factor. Such probes can be used as part of a diagnostic test kit for identifying a biological sample, such as fluids, cells or tissues, which mis-express the protein, such as by measuring levels of a nucleic acid molecule encoding the protein in a sample of a fluid or cells from a subject, e.g., detecting mRNA levels or determining whether a gene encoding the protein has been mutated or deleted. Embodiments also include nucleic acid pancreatic cancer biomarkers that differ, due to degeneracy of the genetic code, from the nucleotide sequence of nucleic acids encoding a protein that corresponds to a pancreatic cancer biomarker, and thus encode the same protein.

### Method for Assessing the Presence, Absence or Progression of Pancreatic Cancer

[0137] Some of the methods and composition provided herein include methods for assessing the presence absence, progression or stage of a cancer, in particular pancreatic cancer, in a subject. Some such embodiments include determining the level of at least one pancreatic cancer biomarker in a sample from said subject. In some embodiments, the pancreatic cancer biomarker comprises at least one polypeptide or fragment thereof or at least one nucleic acid encoding the polypeptide. In some embodiments, the polypeptide is selected from any polypeptide provided herein, for example, SEQ ID NOs:1-31 or 39-793, for example, SEQ ID NOs:1-19, 47, 49-58, 206, 726, 729, 780 or 793.

[0138] In some embodiments, a sample is obtained from the gastrointestinal tract of a subject using methods provided herein.

[0139] Some embodiments include determining the level in the sample of at least 2 pancreatic cancer biomarkers, at least 3 pancreatic cancer biomarkers, at least 4 pancreatic cancer biomarkers, at least 5 pancreatic cancer biomarkers, at least 6 pancreatic cancer biomarkers, at least 7 pancreatic cancer biomarkers, at least 8 pancreatic cancer biomarkers, at least 9 pancreatic cancer biomarkers, at least 10 pancreatic cancer biomarkers, at least 11 pancreatic cancer biomarkers, at least 12 pancreatic cancer biomarkers, at least 13 pancreatic cancer biomarkers, at least 14 pancreatic cancer biomarkers, at least 15 pancreatic cancer biomarkers, at least 16 pancreatic cancer biomarkers, at least 17 pancreatic cancer biomarkers, at least 18 pancreatic cancer biomarkers, at least 19 pancreatic cancer biomarkers, or at least 20 pancreatic cancer biomarkers.

[0140] Some embodiments also include comparing the level of at least one pancreatic cancer biomarker in a sample of a subject with the level of the pancreatic cancer biomarker in a sample from a subject without the cancer. Some embodiments also include comparing the level of at least one pancreatic cancer biomarker in a sample of a subject with the level of the pancreatic cancer biomarker in a sample from a subject with the cancer.

[0141] Some embodiments also include comparing the level of at least one pancreatic cancer biomarker in a sample of a subject with the level of a control molecule. In some embodiments, the levels of a control molecule are determined in the sample from a subject. In some embodiments a control molecule comprises a non-pancreatic polypeptide. In some embodiments a control molecule comprises a non-pancreatic polypeptide that originates from the gastrointestinal tract. In some embodiments the levels of a control molecule are determined in the sample from a subject with cancer. In some embodiments the levels of a control molecule are determined in the sample from a subject without cancer. In some embodiments, the level of at least 1 control molecule is determined in a sample. In some embodiments, the level of at least about 2, 5, 10, or 15 control molecules are determined in a sample. Examples of control molecules include polypeptides and fragments thereof and nucleic acids encoding such polypeptides and fragments thereof, in which the polypeptide comprises, consists essentially of, or consists of SEQ ID NO:27, 32-40, 45, 54, 59 and 59. More examples of control molecules include CEA, and CA19-19.

[0142] In some embodiments, an increase in the level of the pancreatic cancer biomarker in a sample from a subject compared to the level of the pancreatic cancer biomarker in a sample from said subject without the cancer is indicative of the presence of the cancer in the subject. In some such embodiments, the pancreatic cancer biomarker can include a polypeptide or a fragment thereof, a nucleic acid encoding the polypeptide or fragment thereof, in which the polypeptide includes SEQ ID NOs: 17-19, 47, 726, 729 or 780.

[0143] In some embodiments, an increase in the level of a pancreatic cancer biomarker in a sample compared to the level of the pancreatic cancer biomarker in a sample obtained from a subject without a cancer is indicative of the cancer, in which the increase is at least about a 3-fold increase at least about a 5-fold increase, at least about a 10-fold increase, at least about a 20-fold increase, at least about a 30-fold increase, at least about a 40-fold increase, at least about a 50-fold increase, at least about a 60-fold increase, at least about a 70-fold increase, at least about a 80-fold increase, at least about a 90-fold increase, and at least about a 100-fold increase.

[0144] In some embodiments, a decrease in the level of the pancreatic cancer biomarker in a sample from a subject compared to the level of the pancreatic cancer biomarker in a sample from said subject without the cancer is indicative of the presence of the cancer in the subject. In some such embodiments, the pancreatic cancer biomarker can include a polypeptide or a fragment thereof, a nucleic acid encoding the polypeptide or fragment thereof, in which the polypeptide includes SEQ ID NOs:1-16, 49, 55-58, 206 or 793.

[0145] In some embodiments, a decrease in the level of a pancreatic cancer biomarker in a sample compared to the level of the pancreatic cancer biomarker in a sample obtained from a subject without a cancer is indicative of the cancer, in which the decrease is at least about a 3-fold decrease at least about a 5-fold decrease, at least about a 10-fold decrease, at least about a 20-fold decrease, at least about a 30-fold decrease, at least about a 40-fold decrease, at least about a 50-fold decrease, at least about a 60-fold decrease, at least about a 70-fold decrease, at least about a 80-fold decrease, at least about a 90-fold decrease, and at least about a 100-fold decrease.

[0146] Methods to determine the level of a pancreatic cancer biomarker in a sample are provided herein. In some embodiments, a method for determining the level of a pancreatic cancer biomarker, such as a polypeptide or fragment thereof, can include an immunoassay. Examples of an immunoassay include a Western blot, an enzyme linked immunoabsorbent assay (ELISA), and radioimmunoassay. In some embodiments, a method for determining the level of a pancreatic cancer biomarker, such as a polypeptide or fragment thereof, can include mass spectrometry.

### Kits

[0147] The present invention further provides a kit for determining the presence, absence, progression, or stage of a cancer in a subject comprising: (a) a lavage fluid for oral administration to a subject; (b) a vessel for collecting the gastrointestinal lavage fluid from the subject; and (c) an agent that selectively binds to at least one polypeptide or fragment thereof or nucleic acid encoding said polypeptide or fragment thereof, wherein said polypeptide comprises an amino acid sequence selected from the group consisting of a polypeptide comprising, consisting essentially of, or consisting of SEQ ID NOs:1-31 or 39-793, for example, SEQ ID NOs:1-19, 47, 49-58, 206, 726, 729, 780 or 793. Such kits can include at least 2, 3, 4, 5, 6, 7, 8, 9, or 10 agents that each selectively bind to a different polypeptide or a nucleic acid encoding said polypeptide or fragment thereof. In some embodiments, the agent comprises an antibody or antigen-binding fragment thereof.

[0148] Some embodiments of the methods and compositions provided herein include a kit comprising an agent which selectively binds to at least one polypeptide comprising an amino acid sequence selected from the group consisting of a polypeptide comprising, consisting essentially of, or consisting of SEQ ID NOs:1-31 or 39-793, for example, SEQ ID NOs:1-19, 47, 49-58, 206, 726, 729, 780 or 793, or a fragment thereof, wherein said agent is attached to a solid support. In some embodiments, the kit can include an agent that selectively binds to at least one polypeptide or nucleic acid encoding a polypeptide, wherein said polypeptide is selected from the group consisting of a polypeptide comprising, consisting essentially of, or consisting of SEQ ID NOs:1-16, 49, 55-58, 206 and 793. In some embodiments, the kit can include an agent that selectively binds to at least one polypeptide or nucleic acid encoding a polypeptide, wherein said polypeptide is selected from the group consisting of a polypeptide comprising, consisting essentially of, or consisting of SEQ ID NOs:17-19, 47, 726, 729 or 780. In some embodiments, the kit can include a plurality of agents that bind to different polypeptides comprising an amino acid sequence selected from the group consisting of a polypeptide comprising, consisting essentially of, or consisting of SEQ ID NOs:1-31 or 39-793, for example, SEQ ID NOs:1-19, 47, 49-58, 206, 726, 729, 780 or 793, or a fragment thereof are attached to said solid support. In some embodiments, the solid support comprises a solid phase test strip or a flow-through test strip. In some embodiments, the kit can also include a detectable agent which selectively binds to said polypeptide.

[0149] Some embodiments of the methods and compositions provided herein include a kit comprising an agent which selectively binds to at least one nucleic acid encoding a polypeptide comprising an amino acid sequence selected from the group consisting of a polypeptide comprising, consisting essentially of, or consisting of SEQ ID NOs:1-31 or 39-793, for example, SEQ ID NOs:1-19, 47, 49-58, 206, 726, 729, 780 or 793, or a fragment thereof, wherein said agent is attached to a solid support. In some embodiments, the kit can include an agent that selectively binds to at least one polypeptide or nucleic acid encoding a polypeptide, wherein said polypeptide is selected from the group consisting of a polypeptide comprising, consisting essentially of, or consisting of SEQ ID NOs:1-16, 49, 55-58, 206 and 793. In some embodiments, the kit can include an agent that selectively binds to at least one polypeptide or nucleic acid encoding a polypeptide, wherein said polypeptide is selected from the group consisting of a polypeptide comprising, consisting essentially of, or consisting of SEQ ID NOs:17-19, 47, 726, 729 or 780. In some embodiments, the kit can include a plurality of agents that bind to nucleic acids encoding different polypeptides comprising an amino acid sequence selected from the group consisting of a polypeptide comprising, consisting essentially of, or consisting of SEQ ID NOs:1-31 or 39-793, for example, SEQ ID NOs:1-19, 47, 49-58, 206, 726, 729, 780 or 793, or a fragment thereof are attached to said solid support. In some embodiments, the solid support comprises a solid phase test strip or a flow-through test strip. In some embodiments, the kit can also include a detectable agent which selectively binds to said polypeptide.

[0150] The present invention is further illustrated by the following examples which should not be construed as limiting in any way. The contents of all cited references, including literature references, issued patents and published patent applications, as cited throughout this application are hereby expressly incorporated herein by reference. It should further be understood that the contents of all the figures and tables attached hereto are expressly incorporated herein by reference.

### EXAMPLES

### Example 1

### Identification of Biomarkers Associated with Pancreatic Cancer

[0151] Gastrointestinal lavage fluid was obtained from patients with pancreatic cancer and from control patients, after administration of magnesium citrate (MgC) to the patients. Polypeptides were identified in gastrointestinal lavage fluid using mass spectrometry, and further characterized with MASCOT analysis. The presence or absence and/or levels of particular polypeptides were further confirmed using ELISA analyses. In the MASCOT analysis, a score indicates the relative prevalence of a protein or polypeptide, for example, a higher score indicates a greater prevalence for a particular protein or polypeptide in a sample, such that the most prevalent protein or polypeptide in sample will have the highest MASCOT score, and a ranking of “1.” Higher Mascot scores indicate better protein hits and can be correlated to relative protein levels. A score threshold of “>40” was indicative of a p-value significance of <0.05 as determined by the Mascot scoring system based on the search of this database with no enzyme specificity; a score of 40 is consistent with a p<0.01. Standard Mascot scoring was used whereby only the highest score was added for each peptide detected, even if it was sampled during MS/MS multiple times. For all data included, scores were all >40 in at least one sample per protein line. For additional confidence, the numbers of significant peptides were also reported and a minimum criteria of at least 2 peptides was selected. Very few had less than 3 peptides. All significant peptides counted represented different sequences (individual peptides) from their respective proteins. The score and numbers of significant peptides are reported in the format x/y where x is the score and y the number of significant peptides. If a protein was not detected in a particular sample it is listed as “ND”.

[0152] Gastrointestinal lavage fluid was collected from patients and analyzed with mass spectrometry (MS) and commercial ELISA. MS Data were acquired on an LTQ-Orbitrap mass spectrometer using input from an LC system. The A solvent contained 3% of B and 0.2% formic acid in water. The B solvent contained 3% of A and 0.2% formic acid in acetonitrile. Solvents were HPLC grade from Fisher. For a 120 min run, the starting solvent was 5% B and remains for 7 min. The gradient was changed to 10% by 13 min, 40% by 83 min, 90% by 103 min, then reduced from 90% to 5% at 111 min. It was then re-equilibrated for the next injection. Three injections were performed for each sample for repeatability determination. The MS was scanned (Orbitrap) over the mass range from 400 m/z to 2000 m/z every second while the LTQ (Trap) acquired up to 5 MSMS (peptide sequence) spectra in parallel. Data were acquired using the standard Thermo Xcalibur software. Peptides were eluted from a C18 LC column using triplicate injections. A search file was created from the triplicate injections from each lavage preparation (patient sample) and converted into a MGF (Mascot Generic Format) file using a combination of Xcalibur and Mascot software packages. Database searching was done using the Mascot search engine (Matrix Science, UK) against the RefSeq database (http://www.ncbi.nlm.nih.gov/RefSeq/) with taxonomy specified as human (homo sapiens), a mass accuracy of 10 ppm for the parent ion (MS) and 0.6 Da for the fragment ions (MS/MS), and “semitrypsin” selected. The RefSeq database was supplemented by the addition of antibody sequences that are included in the SwissProt protein database, as these antibody sequences are not part of the standard RefSeq listing.

[0153] Table 1 provides examples of proteins and polypeptides whose levels were found to have been reduced in pancreatic cancer. In Table 1, the proteins include pancreatic enzymes, such as lipase and amylase, and other pancreatic proteins such as lithostathine. The most dramatic change was observed with pancreatic triacylglycerol lipase precursor which was the most abundant protein in gastrointestinal lavage fluid from control patient, but was not detected (ND) in gastrointestinal lavage fluid from patient with pancreatic cancer.

TABLE 1
Proteins with Reduced Levels in Gastrointestinal
Lavage Fluid of Subjects with Pancreatic Cancer

| | NCBI | | | | MgC** Pancreatic | |
|---|---|---|---|---|---|---|
| SEQ ID | Accession | | MgC** Control | | Cancer | |
| NO.: | Nos. | Protein name | Ranking | Score | Ranking | Score |
| 1 | 10835000 | pancreatic triacylglycerol | 1 | 5010 | — | ND* |
| | | lipase precursor | | | | |
| 2 | 4502085 | pancreatic alpha-amylase | 2 | 4818 | 13 | 1947 |
| | | precursor | | | | |
| 3 | 10280622 | alpha-amylase 2B precursor | 3 | 4581 | 14 | 1933 |
| 4 | 4502997 | carboxypeptidase A1 | 4 | 3974 | 217 | 479 |
| | | precursor | | | | |
| 5 | 40254482 | alpha-amylase 1 precursor | 5 | 3675 | 18 | 1883 |
| 6 | 54607080 | carboxypeptidase B | 10 | 2567 | — | ND |
| | | preproprotein | | | | |
| 7 | 217416390 | carboxypeptidase A2 | 11 | 2504 | — | ND |
| | | precursor | | | | |
| 8 | 236460050 | chymotrypsin-like elastase | 17 | 1854 | 168 | 534 |
| | | family member 3A | | | | |
| | | preproprotein | | | | |
| 9 | 62526043 | chymotrypsin-C | 19 | 1649 | — | ND |
| | | preproprotein | | | | |
| 10 | 15559207 | chymotrypsin-like elastase | 21 | 1437 | 239 | 462 |
| | | family member 2A | | | | |
| | | preproprotein | | | | |
| 11 | 6679625 | chymotrypsin-like elastase | 24 | 1276 | 65 | 747 |
| | | family member 3B | | | | |
| | | preproprotein | | | | |
| 12 | 4506147 | trypsin-2 preproprotein | 26 | 1166 | 59 | 785 |
| 13 | 4506145 | trypsin-1 preproprotein | 32 | 1022 | 46 | 890 |
| 14 | 29725633 | lithostathine-1-alpha | 36 | 895 | 103 | 640 |
| | | precursor | | | | |
| 15 | 118498350 | chymotrypsinogen B2 | 42 | 770 | — | ND |
| | | precursor | | | | |
| 16 | 10835248 | lithostathine-1-beta precursor | 47 | 542 | — | ND |

*ND = not detected
**MgC = magnesium citrate

[0154] Table 2 provides examples of proteins and polypeptides whose levels were found to have increased in pancreatic cancer, with the most significant changes being for mucin-2.

TABLE 2
Proteins with Increased Levels in Gastrointestinal
Lavage Fluid of Subjects with Pancreatic Cancer

| | NCBI | | | | MgC** Pancreatic | |
|---|---|---|---|---|---|---|
| SEQ ID | Accession | | MgC** Control | | Cancer | |
| NO.: | Nos. | Protein name | Ranking | Score | Ranking | Score |
| 17 | 16306550 | selenium-binding | 25 | 1178 | 17 | 1887 |
| | | protein 1 | | | | |
| 18 | 83367077 | mucin-16 | 53 | 502 | 39 | 1018 |
| 19 | 116284392 | mucin-2 | 215 | 223 | 16 | 1921 |
| | | precursor | | | | |

**MgC = magnesium citrate

[0155] Table 3 provides examples of blood/serum proteins identified in gastrointestinal lavage fluid obtained from patients. Generally, blood proteins were found to have a low abundance in gastrointestinal lavage fluid obtained from patients. However, albumin was found to have increased levels in gastrointestinal lavage fluid obtained from patients with pancreatic cancer.

TABLE 3
Blood/Serum Proteins Present in Gastrointestinal
Lavage Fluid of Subjects with Pancreatic Cancer

| | NCBI | | Pancreatic | | | |
|---|---|---|---|---|---|---|
| SEQ ID | Accession | | Cancer | | Control | |
| NO.: | Nos. | Protein name | Ranking | Score | Ranking | Score |
| 20 | 4502027 | serum albumin | 1 | 4069 | 20 | 1638 |
| | | preproprotein | | | | |
| 21 | 4557871 | serotransferrin | 11 | 1252 | 287 | 199 |
| | | precursor | | | | |
| 22 | 115298678 | complement C3 | 117 | 247 | 779 | 130 |
| | | precursor | | | | |
| 23 | 50363217 | alpha-1-antitrypsin | 9 | 1531 | 16 | 1940 |
| | | precursor | | | | |
| 24 | 66932947 | alpha-2- | 60 | 452 | 336 | 190 |
| | | macroglobulin | | | | |
| | | precursor | | | | |
| 25 | 4557321 | apolipoprotein A-I | — | — | — | — |
| | | preproprotein | | | | |
| 26 | 324021745 | vitamin D-binding | 420 | 66 | 0 | 0 |
| | | protein isoform 3 | | | | |
| | | precursor | | | | |
| 27 | 105990532 | apolipoprotein B-100 | 222 | 118 | 86 | 351 |
| | | precursor | | | | |
| 28 | 4826762 | haptoglobin isoform 1 | 27 | 795 | 0 | 0 |
| | | preproprotein | | | | |
| 29 | 62739186 | complement factor H | 1827 | 29 | 0 | 0 |
| | | isoform a precursor | | | | |
| 30 | 4557485 | ceruloplasmin | 115 | 250 | 2820 | 40 |
| | | precursor | | | | |
| 31 | 11321561 | hemopexin precursor | 113 | 256 | 1594 | 83 |

[0156] Because the levels of certain proteins and polypeptides may vary between different samples, for example, between different patients, and between different samples taken from the same patient at different times, control proteins and polypeptides were identified in gastrointestinal lavage fluid from patients. Table 4 provides example proteins and polypeptides whose levels did not fluctuate significantly between patients with and without pancreatic cancer. The proteins and polypeptides listed in Table 4 include those that originate from the intestine. Some of these proteins that originate from the intestine had an apparent increase in levels in pancreatic cancer, however, this may have been partly due to decreased levels in pancreatic enzymes and other proteins. Preferred control proteins included any with relatively constant levels between patient, and patient types, and included calcium-activated chloride channel regulator 1 precursor; intestinal-type alkaline phosphatase precursor; sucrase-isomaltase intestinal; and maltase-glucoamylase intestinal.

TABLE 4
Proteins not Exhibiting Significant Fluctuation in Gastrointestinal
Lavage Fluid of Subjects with Pancreatic Cancer

| | NCBI | | | | MgC** Pancreatic | |
|---|---|---|---|---|---|---|
| SEQ ID | Accession | | MgC** Control | | Cancer | |
| NO.: | Nos. | Protein name | Ranking | Score | Ranking | Score |
| 32 | 157266300 | aminopeptidase N precursor | 6 | 3633 | 25 | 1589 |
| 33 | 110611231 | calcium -activated chloride | 9 | 2731 | 6 | 4412 |
| | | channel regulator 1 precursor | | | | |
| 34 | 157266292 | intestinal-type alkaline | 91 | 339 | 54 | 830 |
| | | phosphatase precursor | | | | |
| 35 | 223942069 | enteropeptidase precursor | 43 | 656 | 43 | 914 |
| 36 | 18765694 | dipeptidyl peptidase 4 | 33 | 970 | 36 | 1125 |
| 37 | 153070264 | meprin A subunit beta | 27 | 1164 | 47 | 885 |
| | | precursor | | | | |
| 38 | 153070262 | meprin A subunit alpha | 31 | 1030 | 23 | 1713 |
| | | precursor | | | | |
| 39 | 157364974 | sucrase-isomaltase intestinal | 23 | 1290 | 15 | 1930 |
| 40 | 221316699 | maltase-glucoamylase | 12 | 2434 | 7 | 3811 |
| | | intestinal | | | | |

**MgC = magnesium citrate

[0157] Other proteins whose levels were found to either decrease or increase in cancer are shown in Table 5. Alpha-1-antitrypsin may originate from blood while other proteins listed were not typically detected in serum/plasma samples.

TABLE 5

| | NCBI | | | | MgC** Pancreatic | |
|---|---|---|---|---|---|---|
| SEQ ID | Accession | | MgC** Control | | Cancer | |
| NO.: | Nos. | Protein name | Ranking | Score | Ranking | Score |
| 41 | 7669492 | glyceraldehyde-3-phosphate | 7 | 2793 | 30 | 1280 |
| | | dehydrogenase | | | | |
| 42 | 10334859 | creatine kinase U-type | 44 | 656 | — | |
| | | mitochondrial precursor | | | | |
| 23 | 50363217 | alpha-1-antitrypsin precursor | 16 | 1940 | 9 | 3440 |
| 44 | 110618248 | cadherin-related family | 54 | 501 | — | |
| | | member 5 isoform 1 precursor | | | | |
| 45 | 148539840 | deleted in malignant brain | 57 | 471 | — | |
| | | tumors 1 protein isoform a | | | | |
| | | precursor | | | | |
| 46 | 285002214 | cadherin-related family | 41 | 785 | 70 | 726 |
| | | member 2 precursor | | | | |
| 47 | 98986445 | carcinoembryonic antigen- | 222 | 221 | 34 | 1152 |
| | | related cell adhesion molecule | | | | |
| | | 5 preproprotein | | | | |
| 48 | 4502517 | carbonic anhydrase 1 | 487 | 162 | 31 | 1273 |

**MgC = magnesium citrate

### Example 2

### Analysis of Biomarkers in Patients

[0158] MS analysis indicating target protein position for gastrointestinal lavage fluid samples from four patients with pancreatic cancer was compared to four normal volunteers. For ELISA analysis, gastrointestinal lavage fluid collected from patients and volunteers was diluted ten-fold with phosphate buffered saline (lx PBS) and analyzed with commercial ELISA methods for some of the proteins and markers detected by MS as well as for known cancer associated antigens. These included pancreatic amylase (ARUP Test #20506, ARUP Laboratories, Salt Lake City, Utah), pancreatic lipase (ARUP Test #20715, ARUP Laboratories, Salt Lake City, Utah), carcinoembryonic antigen (CEA) (ARUP Test #20746, ARUP Laboratories, Salt Lake City, Utah), CA19-9 (ARUP Test #20746, ARUP Laboratories, Salt Lake City, Utah) and trypsin-like immunoreactivity (ARUP Test #70003, ARUP Laboratories, Salt Lake City, Utah). ELISA analyses showed agreement with mass spectrometry where the amounts of pancreatic enzymes in general were reduced and other proteins increased. The results for MS data and ELISA data are summarized in Tables 6 and 7, respectively.

TABLE 6
Mass Spectrometry Analysis

| | NCBI | | MS Posn for | | | | MS Posn for | | | |
|---|---|---|---|---|---|---|---|---|---|---|
| SEQ ID | Accession | | cancer patients | | | | control patients | | | |
| NO.: | Nos. | Protein name | PC1 | PC2 | PC3 | PC4 | C1 | C2 | C3 | C1 |
| 1 | 10835000 | pancreatic | ND | ND | ND | ND | 2 | 1 | 4 | 1 |
| | | triacylglycerol | | | | | | | | |
| | | lipase precursor | | | | | | | | |
| 2 | 4502085 | pancreatic alpha- | ND | ND | 63 | ND | 7 | 5 | 1 | 2 |
| | | amylase precursor | | | | | | | | |
| 3 | 10280622 | alpha-amylase 2B | ND | ND | ND | ND | 14 | 8 | 2 | 3 |
| | | precursor | | | | | | | | |
| 13 | 4506145 | trypsin-1 | 29 | 18 | 12 | ND | 9 | 33 | 9 | 18 |
| | | preproprotein | | | | | | | | |
| 12 | 4506147 | trypsin-2 | 48 | 26 | 17 | ND | 6 | 28 | 15 | 28 |
| | | preproprotein | | | | | | | | |

TABLE 7
ELISA Analysis

| | | | Concentration | | | | Concentration | | | |
|---|---|---|---|---|---|---|---|---|---|---|
| | NCBI | | in cancer | | | | in control | | | |
| SEQ ID | Accession | Protein name, | patient samples | | | | patient samples | | | |
| NO. | Nos. | concentration units | PC1 | PC2 | PC3 | PC4 | C1 | C2 | C3 | C1 |
| 1 | 10835000 | pancreatic lipase, | <4 | <4 | <4 | <4 | 2793 | 1060 | 4040 | 2525 |
| | | U/L | | | | | | | | |
| 2 | 4502085 | pancreatic amylase, | 32 | 31 | 3 | <3 | 786 | 392 | 1240 | 929 |
| 3 | 10280622 | U/L | | | | | | | | |
| 12 | 4506145 | trypsin-like | 113 | 193 | 74 | 3 | 110 | 178 | 380 | 1586 |
| 13 | 4506147 | immunoreactivity, | | | | | | | | |
| | | ng/mL | | | | | | | | |
| 47 | 98986445 | carcinoembryonic | 807 | 526 | 157 | 1311 | 84 | 80 | 28 | 34 |
| 497 | 40255013 | antigen, ng/mL | | | | | | | | |
| 729 | 121114300 | | | | | | | | | |
| 726 | 296317312 | | | | | | | | | |
| N/A | None | CA19-9, U/mL | 43 | 83 | 43 | 34 | 28 | 23 | 8 | 6 |
| | (Glycan, | | | | | | | | | |
| | not | | | | | | | | | |
| | protein) | | | | | | | | | |

### Example 3

### Collection of Samples

[0159] GLF samples were collected from normal volunteers and analyzed by MS. Samples taken early in the bowel cleansing process (following initial induction of copious diarrhea) were compared to samples taken the end of the bowel preparation. The analysis showed that early sample collection yielded results (with respect to protein MS position) similar to the samples collected at the end of the bowel preparation. Thus a full bowel preparation, while desirable to remove stool material, may not be required in particular methods.

### Example 4

### General Materials and Methods: Sample Collection, Preparation, Processing and Analysis

### Control Samples

[0160] Control samples were obtained from the Gastrointestinal Laboratory University of South Alabama Medical Center by aspiration of residual gastrointestinal lavage fluid (gastrointenstinal lavage fluid) from the bowels of patients at the beginning of the colonoscopy procedure. Control samples were from routine colonoscopies that were found to be free from adenomas or colorectal cancer and were prepared for colonoscopy using SuPrep (Braintree Laboratories, Braintree, Mass.) per manufacturer's instructions or Polyethylene glycol electrolyte solution (PEG-ELS). Approximately 30 ml of gastrointestinal lavage fluid was aspirated into a mucus trap placed in-line with the endoscope. Immediately after collection, gastrointestinal lavage fluid was transferred to a labeled conical centrifuge tube containing a protease-inhibitor tablet (Complete tablet; Roche, Mannheim, Germany) and stored at −20° C. for no more than 48 hours prior to processing.

### Sample Preparation

[0161] After collection, samples were thawed and immediately centrifuged at 1000 rpm (˜200×g) for 25 minutes to remove large particulates and cells (FIG. 1). The supernatant was then centrifuged again at 14,000×g for 25 minutes to remove small particulates and bacteria. All centrifugation steps were performed in an Eppendorf model 5804 R centrifuge at 4° C.

### Protein Isolation

[0162] As further set forth in Example 1, three hundred microliters of each sample was extracted three times with 1 ml of chloroform to remove lipid material and polyethylene glycol. After the final extraction, the aqueous layer was centrifuged at maximum speed for five minutes and 100 μl of the aqueous layer was taken from the top and transferred to a new Eppendorf tube. To precipitate the proteins from the sample, 400 μl of methanol was added to the 100 μl of sample. The sample was centrifuged briefly in a tabletop centrifuge to collect the pellet and 200 μl of chloroform was added to solubilize phospholipids in the methanol layer followed by 300 μl of water to dissolve excess salts and water-soluble pigments. The mixture was vortexed and then centrifuged for five minutes at 13,000×g. This causes the protein to partition at the interface between the aqueous layer, which contains the salts and pigments; and the organic layer, which contains the lipids.

[0163] The aqueous layer (about 750 μl) was carefully removed without disturbing the interface and discarded. After this, the protein at the interface was forced to pellet with the addition of 300 μl of methanol. The mixture was vortexed briefly and centrifuged at 13,000×g for five minutes. The supernatant was discarded and the pellet was dried in a speed vac (Savant, Thermo) for ten minutes. The protein pellet was resuspended in a 20 μl of 8 M urea, 10 mM TCEP, 5 mM EDTA, and 0.1 M ABC solution. Once the pellet was completely dissolved, the mixture was diluted with 60 μl of 50 mM ABC/10 mM TCEP and digested with 2 μl of 10 mM sequencing grade trypsin (Promega) overnight on a shaker at 600 rpm at 37° C.

[0164] The digest was diluted into an LC vial by adding 75 μl of the digest to 20 μl of water and 75 μl of this mixture was injected onto the C₁₈ pre-column (5 μm; 5 by 0.3 mm; Zorbax; Agilent Technologies) connected to an Agilent 1200 series nano-liquid chromatography (nano-LC) pump and thermostated auto-injector (Agilent Technologies, Santa Clara, Calif.). Solvent A was 2% acetonitrile and 0.05% TFA in water, and solvent B consisted of 2% water and 0.05% TFA in acetonitrile. A flow rate of 200 μl/minute was maintained throughout the run. For the first 13 minutes, 2% solvent B was used to load the sample onto a C₁₈ pre-column and wash it. From time 15 to 21 minutes the peptides were eluted from the column with 40% B and this fraction is collected. This was followed by a column wash with 90% B from time 22 to 30 minutes and re-equilibration to 2% B in the final minute. The entire run time was 31 minutes. The A280 peak area of the eluted peptide peak was used as an estimate of how much protein was retrieved.

[0165] The eluted peptides were dried in a speed vac (Savant, Thermo) and re-dissolved in an amount of 0.1% TFA equal to 1/100 of the area of the A280 peak in μl, with a minimum volume of 50 μl and a maximum volume of 500 μl in order to normalize protein concentrations in the injected samples.

### Mass Spectrometry

[0166] Samples were injected in triplicate into an Agilent 1200 series nano-liquid HPLC coupled to a linear ion trap/Orbitrap hybrid MS (LTQ-Orbitrap (Thermo)). The HPLC mobile phases consisted of 3% acetonitrile and 0.2% formic acid in water (solvent A), and 3% water and 0.2% formic acid in acetonitrile (solvent B). A flow rate of 4 μl/minute of 5% solvent B was used to load the sample onto a C₁₈ pre-column (5 μm; 5 by 0.3 mm; Zorbax; Agilent Technologies), and a flow rate of 1 μl/minute was used to elute the sample from the pre-column onto a separating Hypersil Gold C₁₈ chromatography column (30 mm by 0.18 mm; Thermo Fisher Scientific). The linear solvent gradient was slowly ramped to 40% B over 70 min in order to elute the peptides from the column and then to 90% B over the final 20 min to wash the column. The total run time (pre-column and resolving chromatography) for each sample injection was 2 hours. During the 70 minute peptide elution at 40% B, eluted peptides were injected into the nanoflow source of the LTQ for MS-analysis. The LTQ-Orbitrap acquired one MS-only scan (Orbitrap) at a resolution of 60,000, while acquiring up to 5 MS-MS scans (LTQ), with a consistent cycle time of approximately 1 s, using the Xcalibur software program (Thermo Fisher Scientific). Peptide masses selected for fragmentation were then added to an exclusion list (within 10 ppm) to prevent repeated sequencing of abundant peptides for five minutes.

### Example 5

### Data Analysis and Results

[0167] MS/MS peptide sequence data obtained from the LTQ-Orbitrap from a representative control gastrointestinal lavage fluid sample collected during colonoscopy and prepared using the standard method described in FIG. 1 above were converted to mascot generic format files (.mgf) and ID matches identified using the Mascot search engine (http://www.matrixscience.com). Protein identifications (with a threshold of 95% confidence) were determined by the Mascot software program. All files were searched against a custom database generated by combining the NCBI RefSeq database with SwissProt Ig sequences (Feb. 8, 2012—33712 sequences; 18670280 residues) using taxonomy: human, enzyme specificity: semi-trypsin, and a mass accuracy of 10 ppm for precursor ions and 0.6 DA for MS/MS data.

[0168] Table 8 shows the top 19 hits in order of Mascot Score, which is determined by how closely the data matches the theoretical data generated for that peptide sequence. The higher the score the more accurate the match as well as the more abundant the protein is in the sample.

TABLE 8

| SEQ | | NCBI | | |
|---|---|---|---|---|
| ID | | Accession | | |
| NO: | Rank | No. | Mascot Score | Protein Name |
| 2 | 1 | 4502085 | 1212 | Pancreatic alpha amylase precursor (homo |
| | | | | sapiens) |
| 3 | 2 | 10280622 | 1093 | Alpha-amylase 2B precursor (homo |
| | | | | sapiens) |
| 49 | 3 | 148536848 | 1057 | Bile salt activated lipase precursor (homo |
| | | | | sapiens) |
| 1 | 4 | 10835000 | 1053 | Pancreatic triacylglycerol lipase precursor |
| | | | | (homo sapiens) |
| 6 | 5 | 54607080 | 501 | Carboxypeptidase B preprotein (homo |
| | | | | sapiens) |
| 8 | 6 | 236460050 | 395 | Chymotrypsin-like elastase family |
| | | | | member 3A preprotein (homo sapiens) |
| 50 | 7 | 193806374 | 364 | RecName: Full = Ig mu chain C region |
| 51 | 8 | 113584 | 354 | RecName: Full = Ig alpha-1 chain C region |
| 13 | 9 | 4506145 | 335 | Trypsin-1 preprotein (homo sapiens) |
| 52 | 10 | 31377806 | 323 | Polymeric immunoglobulin receptor |
| | | | | precursor (homo sapiens) |
| 4 | 11 | 4502997 | 297 | Carboxypeptidase A1 precursor |
| 10 | 12 | 15559207 | 280 | Chymotrypsin-like elastase family |
| | | | | member 2A preprotein (homo sapiens) |
| 53 | 13 | 218512088 | 273 | RecName: Full = Ig alpha-2 chain C region |
| 54 | 14 | 341913702 | 269 | PREDICTED: deleted in malignant brain |
| | | | | tumors 1 protein isoform 2 |
| 12 | 15 | 4506147 | 218 | Trypsin-2 preprotein (homo sapiens) |
| 11 | 16 | 6679625 | 206 | Chymotrypsin-like elastase family |
| | | | | member 3B preprotein (homo sapiens) |
| 55 | 17 | 118498341 | 196 | Chymotrypsinogen B precursor (homo |
| | | | | sapiens) |
| 23 | 18 | 50363217 | 166 | Alpha-1-antitrypsin precursor (homo |
| | | | | sapiens) |
| 7 | 19 | 217416390 | 165 | Carboxypeptidase A2 precursor (homo |
| | | | | sapiens) |

### Mass, Time, and Intensity Data

[0169] The intensity of detected peptides was calculated based on MS data using an approach similar to the Accurate Mass Tag (AMT) method developed by Smith and coworkers (Conrads, T. P. et al., (2000) Anal. Chem. 72, 3349-3354; Strittmatter, E. F. et al., (2003) J. Am. Soc. Mass Spectrom. 14, 980-991). A program called DifProWare, a Web-based platform developed at the University of South Alabama (available at http://mciproteomics.usouthal.edu/difproware/) (Tucker, A. M. et al., (2011) Appl. Environ. Microbiol. 77, 4712-4718), was used to generate the mass, time, and intensity data for analysis. Briefly, MS/MS peptide sequence data were converted to mascot generic format files (.mgf) and matches identified using the Mascot search engine (http://www.matrixscience.com). Protein identifications (with a threshold of 95% confidence) were determined by the Mascot software program. All files were searched against a custom database generated by combining the NCBI RefSeq database with SwissProt Ig sequences (Feb. 8, 2012—33712 sequences; 18670280 residues) using taxonomy: human, enzyme specificity: semi-trypsin, and a mass accuracy of 10 ppm for precursor ions and 0.6 DA for MS/MS data.

[0170] The MS-only data were examined using the ReSpect algorithm (Positive Probability, Ltd., Isleham, United Kingdom). This algorithm deconvolves detected peaks, converts electrospray mass spectra to zero-charge spectra, and corrects baselines, improving signal-to-noise ratios. The raw MS-only isotopic data are processed, generating a file containing deconvoluted mass, time, intensity, and probability statistics. Peptides were only accepted for analyses if they had an isotopic profile agreement confidence level of >95%. The Mascot ID information for each peptide as well as its mass, time, and intensity data in each sample being compared is combined within DifProWare and the resulting file is a comma-separated spreadsheet file associating peptide mass, time, intensity, and ID data.

### Peptide to Protein Rollup

[0171] Protein abundances were calculated from the individual peptide abundances using the Rollup algorithm implemented in DanteR 0.2 (Taverner, T. et al., (2012) Bioinformatics 28, 2404-2406; Polpitiya, A. D. et al., (2008) Bioinformatics 24, 1556-1558) running under R 32-bit version 2.15.2 (R Development Core Team. (2013) R: a language and environment for statistical computing. R Foundation for Statistical Computing, Vienna, Austria. http://www.R-project.org) under Windows 7. DanteR is an open source software package that was developed by Tom Taverner and Ashoka Polpitiya at the Pacific Northwest National Laboratory to analyze proteomic data generated using the accurate mass and time tag approach.

[0172] This process combines intensity information from individual peptides into a single “intensity” for their identified protein. A brief summary of the process is as follows: For each group of peptides belonging to a single protein, the peptide with the highest overall abundance across all samples is chosen as a reference peptide. All peptides belonging to that protein are then expressed as a ratio to the reference value. The median ratio for each peptide across all samples is also calculated and the median ratio is subtracted from each peptide ratio. Outliers are then detected using Grubb's test and removed, and the median value of remaining selected peptide intensities is used to calculate the protein intensity.

[0173] The rollup was performed with the following parameters: rolling up using NCBI Accession number, minimum presence of at least one peptide at 50%, mode median, minimum dataset presence of three peptides, minimum number of peptides required for Grubb's test of 5, and p-value cutoff for Grubb's test at 0.05. The resulting spreadsheet of identified proteins and relative abundances was used in the subsequent statistical analyses.

### Comparison of Home Collected Versus Clinic Collected Samples

[0174] In order to prove that major proteins were unaffected by the difference in the collection method between the home collected samples and the clinic collected samples, an experiment was performed comparing 44 matched pairs of samples. In one set, samples are self-collected by the subject via the toilet collection container method in which a hat is placed on a toilet seat for collection of gastrointestinal lavage fluid and transferred to tube with inhibitor immediately prior to colonoscopy (“hat samples”). In another set, samples are collected during colonoscopy through an endoscope (“scope samples”). Protein intensity values of the 44 “hat” and “scope” samples were obtained from LC-MS/MS data using the peptide to peptide rollup procedure described above and were compared using the Mann Whitney U test. The p-values are shown in Table 9 for three of the major proteins in gastrointestinal lavage fluid: carboxypeptidase B, pancreatic tracylglycerol lipase and chymotrypsin-like elastase family member 2A, demonstrating the differences were not significant.

TABLE 9
Comparison of Hat vs. Scope Collections

| | NCBI | | | |
|---|---|---|---|---|
| SEQ | Accession | # | | |
| ID NO. | Nos. | Peptides | Protein ID | P value |
| 6 | 54607080 | 30 | Carboxypeptidase B | 0.90368 |
| 1 | 10835000 | 41 | Pancreatic triacylglycerol lipase | 0.40868 |
| 10 | 15559207 | 15 | Chymotrypsin-like elastase | 0.84777 |
| | | | family member 2A | |

[0175] Overall comparisons of changes in individual hat and scope pairs were no greater than changes seen in replicates of the same samples. Therefore, the collection method does not affect the data and the two methods may be used interchangeably and compared.

### Reproducibility of Methodology

[0176] One control sample was processed six times according to the standard methods described previously and the ratios of the intensities of the indicated proteins were analyzed between all pairs of replicates (36 combinations) (FIG. 2). A ratio of 1=identical. Bars show the 5-95% range of the ratios. Analytical replicates did not vary from each other by more than ˜20%. The data demonstrated that the profiles of key proteins as shown in FIG. 2 showed little variation, and that the method is highly reproducible. 2-sigma confidence level is shown.

Comparison of Abundance of Proteins in GLF of Subjects with Resectable Pancreatic Ductal Adenocarcinoma Versus Abundance of Proteins in GLF of Healthy Subjects

[0177] PDAC gastrointestinal lavage fluid samples were collected from 27 cases of resectable PDAC patients in pre-op prior to surgery. Patients had been bowel prepped with two bottles of magnesium citrate solution the previous night and had not eaten or drank since midnight the night before the sample was taken. Patients were asked to defecate into a collection container that fits over the toilet, and the gastrointestinal lavage fluid was transferred to a labeled conical centrifuge tube containing a protease inhibitor tablet (Complete tablet; Roche, Mannheim, Germany) and transported to the laboratory immediately on ice.

[0178] The average rankings of the top pancreatic proteins in gastrointestinal lavage fluid were compared between these 27 PDAC patients and 121 control gastrointestinal lavage fluid samples collected at colonoscopy as described previously using the ranking of protein abundance as determined by Mascot as described previously above. The ranking of the pancreatic proteins was significantly decreased in the PDAC group as compared to the control group (p<1.0E-09) (Table 10). Average intensities calculated using the rollup algorithm as described above were also compared and the fold change indicated.

TABLE 10
Relative abundance of proteins detected in the GLF between healthy
control N = 121 and resectable PDAC (N = 27) cases out of >300 detectable proteins
(ND = non-detected)

| | | | | | Intensity |
|---|---|---|---|---|---|
| | | | | | Fold |
| | NCBI | | | | Decrease |
| SEQ ID | Accession | | Healthy | PDAC | PDAC/ |
| NO. | Nos. | Protein ID | Rank | Rank | Healthy |
| 1 | 10835000 | Pancreatic triacylglycerol lipase | 1 | 391 | 226 |
| 2 | 4502085 | Pancreatic alpha-amylase | 2 | 21 | 7 |
| 3 | 10280622 | Alpha-amylase 2B | 3 | 22 | 18 |
| 4 | 4502997 | Carboxypeptidase A1 | 4 | 160 | 10 |
| 56 | 56549662 | Alpha-amylase 1 | 5 | 20 | 10 |
| 6 | 54607080 | Carboxypeptidase B | 10 | 163 | 25 |
| 7 | 217416390 | Carboxypeptidase A2 | 11 | ND | 27 |
| 8 | 236460050 | Chymotrypsin-like elastase | 17 | 124 | 38 |
| | | family member 3A | | | |
| 9 | 62526043 | Chymostrypsin-C | 19 | ND | 53 |
| 10 | 15559207 | Chymotrypsin-like elastase | 21 | 126 | 6 |
| | | family member 2A | | | |
| 11 | 6679625 | Chymotrypsin-like elastase | 24 | 107 | 7 |
| | | family member 3B | | | |

*12 of the PDAC cases showed no evidence of ductal dilation

### Analysis of Amylase and Lipase Via Spectrometry and ELISA

[0179] GLF samples obtained from three control samples obtained by colonoscopy and three of the PDAC samples obtained prior to surgery were diluted 10× in PBS and analyzed for amylase and lipase using standard ELISA methods which measure units of enzyme per liter. The data demonstrated a greater than 250 fold decrease in lipase and a greater than 3.7 fold decrease in amylase between the PDAC and control samples. Furthermore the MS data and the ELISA data were concordant. MS values are denoted with Mascot scores, determined as described previously above.

TABLE 11
Comparison of Amylase and Lipase Assessed via Mass Spectrometry (MS)
vs. ELISA in Healthy and PDAC samples

| | | | Amylase | Lipase 78974 |
|---|---|---|---|---|
| | Test Subject # | Assay | 78914 (μ/L) | (μ/L) |
| Healthy | 1 | ELISA | 1240 | 4040 |
| | | MS | 1212 | 1053 |
| | 2 | ELISA | 929 | 2525 |
| | | MS | 1774 | 2297 |
| | 3 | ELISA | 4114 | 2020 |
| | | MS | 2333 | 2386 |
| PDAC | 4 | ELISA | 32 | <4 |
| | | MS | 0 | 0 |
| | 5 | ELISA | 199 | <4 |
| | | MS | 447 | 0 |
| | 6 | ELISA | 250 | <4 |
| | | MS | 251 | 0 |
| | 7 | ELISA | <3 | <4 |
| | | MS | 0 | 0 |

### Comparison of Pancreatic Proteins in Pancreatic Juice as Compared to in Gastrointestinal Lavage Fluid

[0180] The average rankings of the top pancreatic proteins in pancreatic juice collected directly from the pancreatic duct during surgery in six PDAC patients (labeled “pc”), and one patient determined to have an intraductal papillary mucinous neoplasm (labeled “IPMN 75”) (which is a benign lesion than may progress to PDAC if left untreated) were compared to pancreatic juice from three patients found to have benign pancreatic cysts at surgery (labeled “cyst”). Samples were compared as described previously using the ranking of protein abundance as determined by Mascot as described previously above. The ranking of the pancreatic proteins was significantly decreased in the pancreatic juice from the PDAC group as demonstrated previously in gastrointestinal lavage fluid. This shows that pancreatic proteins are reduced in both the direct pancreatic secretions as well as the gastrointestinal lavage fluid. The proteins were still present in the benign IPMN and in the benign cyst cases. Results are depicted in Table 12.

TABLE 12
Comparison of Pancreatic Proteins in Pancreatic Juice as Compared to in Gastrointestinal Lavage Fluid

| | NCBI | | cyst | cyst | cyst | ipmn | pc | pc | pc | pc | pc | pc |
|---|---|---|---|---|---|---|---|---|---|---|---|---|
| SEQ ID | Accession | | 55 | 61 | 69 | 75 | 29 | 5 | 30 | 44 | 47 | 70 |
| NO. | Nos. | Protein name | Posn | Posn | Posn | Posn | Posn | Posn | Posn | Posn | Posn | Posn |
| 49 | 148536848 | bile salt-activated | 4 | 3 | 5 | 3 | 60 | 30 | ND | 162 | ND | 9 |
| | | lipase precursor | | | | | | | | | | |
| 1 | 10835000 | pancreatic | 3 | 4 | 7 | 7 | ND | 81 | ND | 58 | ND | 24 |
| | | triacylglycerol | | | | | | | | | | |
| | | lipase precursor | | | | | | | | | | |
| 12 | 4506147 | trypsin-2 | 13 | 5 | 14 | 6 | 23 | 12 | 34 | 24 | 11 | 21 |
| | | preproprotein | | | | | | | | | | |
| 13 | 4506145 | trypsin-1 | 6 | 8 | 8 | 5 | 21 | 13 | 25 | 22 | 4 | 17 |
| | | preproprotein | | | | | | | | | | |
| 55 | 118498341 | chymotrypsinogen | 8 | 9 | 15 | 8 | 36 | 14 | ND | 16 | 26 | 20 |
| | | B precursor | | | | | | | | | | |
| 57 | 106507261 | pancreatic lipase- | 16 | 11 | 49 | 13 | ND | ND | ND | 85 | ND | 91 |
| | | related protein 2 | | | | | | | | | | |
| | | precursor | | | | | | | | | | |
| 793 | 342672030 | trypsin-3 isoform 3 | 18 | 12 | 22 | 14 | ND | ND | ND | ND | ND | ND |
| | | preproprotein | | | | | | | | | | |
| 8 | 236460050 | chymotrypsin-like | 11 | 14 | 18 | 9 | 225 | ND | ND | 26 | 28 | 23 |
| | | elastase family | | | | | | | | | | |
| | | member 3A | | | | | | | | | | |
| | | preproprotein | | | | | | | | | | |
| 2 | 4502085 | pancreatic alpha- | 10 | 15 | 12 | 12 | 46 | ND | ND | 31 | 3 | 28 |
| | | amylase precursor | | | | | | | | | | |
| 10 | 15559207 | chymotrypsin-like | 20 | 16 | 23 | 30 | ND | ND | ND | ND | ND | ND |
| | | elastase family | | | | | | | | | | |
| | | member 2A | | | | | | | | | | |
| | | preproprotein | | | | | | | | | | |
| 3 | 10280622 | alpha-amylase 2B | 14 | 19 | 13 | 15 | ND | ND | ND | ND | 7 | ND |
| | | precursor | | | | | | | | | | |
| 4 | 4502997 | carboxypeptidase | 21 | 20 | 31 | 21 | ND | 99 | ND | 78 | 42 | ND |
| | | A1 precursor | | | | | | | | | | |
| 6 | 54607080 | carboxypeptidase | 17 | 22 | 16 | 22 | 37 | 15 | ND | 19 | 22 | 31 |
| | | B preproprotein | | | | | | | | | | |
| 23 | 50363217 | alpha-1-antitrypsin | 23 | 23 | 10 | 33 | 12 | 20 | 26 | 12 | 2 | 18 |
| | | precursor | | | | | | | | | | |
| 11 | 6679625 | chymotrypsin-like | 22 | 24 | 30 | 16 | ND | ND | ND | ND | 27 | ND |
| | | elastase family | | | | | | | | | | |
| | | member 3B | | | | | | | | | | |
| | | preproprotein | | | | | | | | | | |
| 9 | 62526043 | chymotrypsin-C | 27 | 28 | 55 | 36 | ND | ND | ND | ND | ND | ND |
| | | preproprotein | | | | | | | | | | |
| 7 | 217416390 | carboxypeptidase | 31 | 29 | ND | 31 | ND | ND | ND | ND | ND | ND |
| | | A2 precursor | | | | | | | | | | |
| 58 | 58331211 | chymotrypsin-like | 29 | 35 | ND | 53 | ND | ND | ND | ND | ND | ND |
| | | elastase family | | | | | | | | | | |
| | | member 2B | | | | | | | | | | |
| | | preproprotein | | | | | | | | | | |

Assessment of Gastrointestinal Lavage Fluid Samples from Subjects with Pancreatic Ductal Adenocarcinoma in Head of Pancreas

[0181] A second group of PDAC patient gastrointestinal lavage fluid samples were obtained. Patients with pancreatic masses detected using imaging were recruited to the study. gastrointestinal lavage fluid samples were collected after detection of the mass but prior to surgery. Those who were subsequently found to have pancreatic ductal adenocarcinoma in the head of the pancreas (n=6) were selected for comparison to the controls. The patient was provided with a kit to take home that included a dose of SuPrep bowel preparation solution (Braintree Laboratories, Braintree, Mass.), a collection container that fits over the toilet, a labeled conical centrifuge tube containing a protease inhibitor tablet (Complete tablet; Roche, Mannheim, Germany), and a disposable pipette for transfer of sample from toilet collection container to conical tube. The patient collected a sample of clear gastrointestinal lavage fluid and shipped it frozen on ice to the laboratory for analysis. The sample was prepared in the same manner as the previously obtained controls that were collected at colonoscopy as described previously. Data were processed using the standard approach described previously, with the exception of a 2 group ANOVA (t-test) in DanteR being used for comparison instead of the Mann Whitney U test. The intensity values of the individual peptides prior to “rollup” into protein values between 81 control samples that had been bowel-prepared with SuPrep and the 6 PDAC head samples that were also bowel-prepared using SuPrep were compared (FIG. 3). Of the 27,318 peptides were analyzed, 619 were significantly decreased in the PDAC cases (p<0.01). In contrast, 2227 peptides were significantly increased in the PDAC cases (p<0.01). Many of the peptides were unidentified and may contain post-translational modifications or mutations that may cause mass shifts.

[0182] The peptide intensity data was “rolled up” into protein intensity data as described above. Intensities of all proteins were compared between the 81 control samples that had been bowel-prepared using SuPrep and the 6 PDAC head samples that were also bowel-prepared using SuPrep using a 2 group ANOVA (t-test) in DanteR (FIG. 4). The data demonstrated that 25 peptides significantly decreased and 33 peptides significantly increased in the PDAC cases.

[0183] Table 13 depicts the rolled up intensity values of proteins present in the 6 PDAC head as compared to the 81 control samples. Log 2 Fold changes and p-values as determined by protein level ANOVA are shown.

TABLE 13
PDAC in the Head of the Pancreas

| | NCBI | | | |
|---|---|---|---|---|
| | Accession | | Log_2 | |
| SEQ ID NO. | Nos. | Protein | change | P value |
| 59 | 189083692 | Fructose-1:6-bisphosphatase 1 | 5.39 | 4.23E−06 |
| 20 | 4502027 | Serum Albumin Preprotein | 3.43 | .0003 |
| 10 | 15559207 | Chymotrypsin-like elastase family | −5.36 | .0008 |
| | | member 2A preprotein | | |
| 60 | 11225609 | Angiotensin-converting enzyme 2 | 3.75 | .0024 |
| | | precursor | | |
| 16 | 6679625 | Chymotrypsin-like elastase family | −1.82 | .0025 |
| | | member 3B preprotein | | |
| 62 | 93141226 | Xaa-Pro aminopeptidase 2 precursor | 3.99 | .0065 |
| 58 | 58331211 | Chymotrypsin-like elastase family | −6.15 | .0189 |
| | | member 2B preprotein | | |
| 6 | 54607080 | Carboxypeptidase B preprotein | −2.18 | .0189 |
| 40 | 221316699 | Maltase-glucoamylase: intestinal | 1.81 | .0398 |

[0184] A similar experiment was performed with respect to gastrointestinal lavage fluid obtained from 3 subjects with neuroendocrine tumors present in the tail of the pancreas and compared to the 81 control samples, per the methods and analysis described above. Table 14 depicts the rolled up intensity values of proteins present in the gastrointestinal lavage fluid obtained from these subjects as compared to the 81 control samples. Log 2 Fold changes and p-values as determined by protein level ANOVA are shown.

TABLE 14
Neuroendocrine Cancer in the Tail of the Pancreas

| | NCBI | | | |
|---|---|---|---|---|
| | Accession | | Log_2 | |
| SEQ ID NO. | Nos. | Protein | change | P value |
| 62 | 93141226 | Xaa-Pro aminopeptidase 2 precursor | 8.42 | 2.26E−05 |
| 63 | 308736985 | Mucin 13 precursor [homo sapiens] | 11.66 | .0002 |
| 64 | 4503273 | Angiotensin-converting enzyme | 2.79 | .0002 |
| | | isoform 1 precursor | | |
| 40 | 221316699 | Maltase-glucoamylase: intestinal | 3.89 | .0016 |
| 56 | 56549662 | Alpha-amylase 1 precursor | 4.65 | .0024 |
| 3 | 10280622 | Alpha amylase 2B precursor | 4.51 | .0051 |
| 2 | 4502085 | Pancreatic alpha-amylase precursor | 6.30 | .0059 |
| 9 | 62526043 | Chymotrypsin-C-preprotein | 5.52 | .0060 |
| 41 | 7669492 | Glyceraldehyde-3 phosphate | 4.29 | .0075 |
| | | dehydrogenase | | |
| 66 | 132814467 | Glutamyl aminopeptidase | 6.91 | .0091 |

[0185] As set forth in Tables 13 and 14, some pancreatic proteins were significantly decreased in PDAC cases but increased or unchanged in neuroendocrine cases.

[0186] Table 15 depicts the mascot positions (ranks) of major pancreatic enzymes, intestinal proteins, and serum proteins (Albumin and AAT) compared between the average of 6 PDAC head samples and the average of the 3 neuroendocrine tail pancreatic cancer samples, collected and processed as described above.

TABLE 15

| | | | | |
|---|---|---|---|---|
| | NCBI | | | |
| SEQ ID | Accession | | Head | Tail |
| NO. | Nos. | Protein | PDAC | Neuroendocrine |

Pancreatic Enzymes

| | | | | |
|---|---|---|---|---|
| 2 | 4502085 | Pancreatic alpha-amylase | 10 | 1 |
| | | precursor | | |
| 3 | 10280622 | Alpha-amylase 2B precursor | 0 | 2 |
| 5 | 40254482 | Alpha-amylase 1 precursor | 12 | 3 |
| 1 | 10835000 | Pancreatic triacylglycerol lipase | 8 | 4 |
| | | precursor | | |
| 8 | 236460050 | Chymotrypsin-like elastase family | 29 | 9 |
| | | member 3A preprotein | | |
| 11 | 6679625 | Chymotrypsin-like elastase family | 44 | 17 |
| | | member 3B preprotein | | |
| 13 | 4506145 | Trypsin-1 preprotein | 47 | 18 |

Intestinal Proteins

| | | | | |
|---|---|---|---|---|
| 39 | 157364974 | Sucrose-isomaltase intestinal | 11 | 7 |
| 32 | 157266300 | Aminopeptidase N precursor | 51 | 8 |
| 40 | 221316699 | Maltase glucoamylase intestinal | 7 | 12 |
| 33 | 110611231 | Calcium-activated chloride | 14 | 1 |
| | | channel regulator 1 precursor | | |

Albumin and AAT

| | | | | |
|---|---|---|---|---|
| 20 | 4502027 | Serum albumin preprotein | 2 | 36 |
| 23 | 50363217 | Alpha-1-antitrypsin precursor | 3 | 6 |

[0187] Table 16 provides a complete list of proteins that change between PDAC and control cases. Table 16 reflects changes in more than just pancreatic enzymes.

TABLE 16
Complete List of Proteins that Change between PDAC and Control Cases

| | NCBI | | | | | |
|---|---|---|---|---|---|---|
| SEQ ID | Accession | | Head | | Tail | |
| NO: | No. | Protein name | Posn | Score | Posn | Score |
| 2 | 4502085 | pancreatic alpha-amylase precursor | 10 | 3554 | 1 | 5890 |
| | | [Homo sapiens] | | | | |
| 3 | 10280622 | alpha-amylase 2B precursor [Homo sapiens] | 0 | 0 | 2 | 5626 |
| 5 | 40254482 | alpha-amylase 1 precursor [Homo sapiens] | 12 | 3320 | 3 | 5557 |
| 1 | 10835000 | pancreatic triacylglycerol lipase | 8 | 4689 | 4 | 3575 |
| | | precursor [Homo sapiens] | | | | |
| 68 | 154146262 | IgGFc-binding protein precursor [Homo sapiens] | 5 | 5354 | 5 | 2765 |
| 23 | 50363217 | alpha-1-antitrypsin precursor [Homo sapiens] | 3 | 5912 | 6 | 2464 |
| 39 | 157364974 | sucrase-isomaltase intestinal [Homo sapiens] | 11 | 3542 | 7 | 2267 |
| 32 | 157266300 | aminopeptidase N precursor [Homo sapiens] | 51 | 824 | 8 | 2088 |
| 8 | 236460050 | chymotrypsin-like elastase family | 29 | 1272 | 9 | 1959 |
| | | member 3A preproprotein [Homo sapiens] | | | | |
| 53 | 218512088 | RecName: Full = Ig alpha-2 chain C region | 4 | 5447 | 10 | 1878 |
| 51 | 113584 | RecName: Full = Ig alpha-1 chain C region | 1 | 7047 | 11 | 1626 |
| 40 | 221316699 | maltase-glucoamylase intestinal [Homo sapiens] | 7 | 5117 | 12 | 1599 |
| 33 | 110611231 | calcium-activated chloride channel | 14 | 2356 | 13 | 1528 |
| | | regulator 1 precursor [Homo sapiens] | | | | |
| 50 | 193806374 | RecName: Full = Ig mu chain C region | 13 | 2856 | 14 | 1499 |
| 69 | 125145 | RecName: Full = Ig kappa chain C region | 9 | 3684 | 15 | 1383 |
| 52 | 31377806 | polymeric immunoglobulin receptor | 6 | 5266 | 16 | 1089 |
| | | precursor [Homo sapiens] | | | | |
| 11 | 6679625 | chymotrypsin-like elastase family | 44 | 904 | 17 | 983 |
| | | member 3B preproprotein [Homo sapiens] | | | | |
| 13 | 4506145 | trypsin-1 preproprotein [Homo sapiens] | 47 | 873 | 18 | 942 |
| 6 | 54607080 | carboxypeptidase B preproprotein | 17 | 1696 | 19 | 871 |
| | | [Homo sapiens] | | | | |
| 10 | 15559207 | chymotrypsin-like elastase family | 60 | 749 | 20 | 826 |
| | | member 2A preproprotein [Homo sapiens] | | | | |
| 9 | 62526043 | chymotrypsin-C preproprotein [Homo sapiens] | 65 | 723 | 21 | 822 |
| 12 | 4506147 | trypsin-2 preproprotein [Homo sapiens] | 48 | 866 | 22 | 821 |
| 55 | 118498341 | chymotrypsinogen B precursor [Homo sapiens] | 20 | 1492 | 23 | 776 |
| 70 | 291045225 | titin isoform N2-A [Homo sapiens] | 39 | 933 | 24 | 736 |
| 71 | 291045230 | titin isoform novex-2 [Homo sapiens] | 38 | 940 | 25 | 705 |
| 64 | 4503273 | angiotensin-converting enzyme isoform | 52 | 820 | 26 | 690 |
| | | 1 precursor [Homo sapiens] | | | | |
| 72 | 119220571 | pancreatic secretory granule membrane | 1256 | 162 | 27 | 671 |
| | | major glycoprotein GP2 isoform 2 | | | | |
| | | precursor [Homo sapiens] | | | | |
| 49 | 148536848 | bile salt-activated lipase precursor | 21 | 1478 | 28 | 624 |
| | | [Homo sapiens] | | | | |
| 36 | 18765694 | dipeptidyl peptidase 4 [Homo sapiens] | 40 | 931 | 29 | 597 |
| 73 | 256222411 | filamin-B isoform 1 [Homo sapiens] | 86 | 561 | 30 | 552 |
| 37 | 153070264 | meprin A subunit beta precursor [Homo sapiens] | 37 | 984 | 31 | 522 |
| 74 | 21489959 | immunoglobulin J chain precursor | 26 | 1435 | 32 | 502 |
| | | [Homo sapiens] | | | | |
| 46 | 285002214 | cadherin-related family member 2 | 16 | 1748 | 33 | 488 |
| | | precursor [Homo sapiens] | | | | |
| 38 | 153070262 | meprin A subunit alpha precursor | 33 | 1147 | 34 | 481 |
| | | [Homo sapiens] | | | | |
| 75 | 4507725 | transthyretin precursor [Homo sapiens] | 15 | 1773 | 35 | 409 |
| 20 | 4502027 | serum albumin preproprotein [Homo sapiens] | 2 | 6899 | 36 | 407 |
| 18 | 83367077 | mucin-16 [Homo sapiens] | 72 | 639 | 37 | 394 |
| 76 | 121039 | RecName: Full = Ig gamma-1 chain C region | 41 | 915 | 38 | 386 |
| 77 | 148833506 | obscurin isoform b [Homo sapiens] | 94 | 546 | 39 | 374 |
| 17 | 16306550 | selenium-binding protein 1 [Homo sapiens] | 31 | 1190 | 40 | 373 |
| 4 | 4502997 | carboxypeptidase A1 precursor [Homo sapiens] | 18 | 1672 | 41 | 373 |
| 78 | 118572606 | hemicentin-1 precursor [Homo sapiens] | 109 | 505 | 42 | 366 |
| 79 | 341913700 | PREDICTED: deleted in malignant brain tumors | 0 | 0 | 43 | 363 |
| | | 1 protein isoform 1 [Homo sapiens] | | | | |
| 45 | 148539840 | deleted in malignant brain tumors 1 protein | 0 | 0 | 44 | 362 |
| | | isoform a precursor [Homo sapiens] | | | | |
| 80 | 125817 | RecName: Full = Ig kappa chain V-III | 0 | 0 | 45 | 347 |
| | | region HAH; Flags: Precursor | | | | |
| 81 | 163659918 | sacsin [Homo sapiens] | 90 | 555 | 46 | 346 |
| 82 | 151301127 | dynein heavy chain 7 axonemal [Homo sapiens] | 177 | 380 | 47 | 344 |
| 83 | 297206791 | fibrous sheath-interacting protein 2 | 82 | 566 | 48 | 342 |
| | | [Homo sapiens] | | | | |
| 84 | 298351714 | RecName: Full = Ig lambda-2 chain C regions | 22 | 1470 | 49 | 338 |
| 85 | 296080693 | glucose-6-phosphate isomerase isoform | 243 | 325 | 50 | 336 |
| | | 1 [Homo sapiens] | | | | |
| 86 | 148762969 | histone-lysine N-methyltransferase | 123 | 478 | 51 | 333 |
| | | MLL2 [Homo sapiens] | | | | |
| 87 | 156766050 | protein AHNAK2 [Homo sapiens] | 111 | 499 | 52 | 330 |
| 88 | 61743954 | neuroblast differentiation-associated | 141 | 443 | 53 | 326 |
| | | protein AHNAK isoform 1 [Homo sapiens] | | | | |
| 89 | 119395750 | keratin type II cytoskeletal 1 | 98 | 542 | 54 | 320 |
| | | [Homo sapiens] | | | | |
| 90 | 113722120 | G-protein coupled receptor 98 precursor | 112 | 498 | 55 | 316 |
| | | [Homo sapiens] | | | | |
| 91 | 30520377 | CUB and zona pellucida-like domain- | 0 | 0 | 56 | 316 |
| | | containing protein 1 precursor | | | | |
| | | [Homo sapiens] | | | | |
| 92 | 257196151 | immunoglobulin-like and fibronectin | 159 | 399 | 57 | 312 |
| | | type III domain-containing protein 1 | | | | |
| | | [Homo sapiens] | | | | |
| 93 | 330688408 | nesprin-1 isoform 1 [Homo sapiens] | 0 | 0 | 58 | 311 |
| 94 | 226246554 | coiled-coil domain-containing protein | 80 | 578 | 59 | 311 |
| | | 168 [Homo sapiens] | | | | |
| 95 | 33188445 | microtubule-actin cross-linking factor 1 | 104 | 520 | 60 | 309 |
| | | isoform a [Homo sapiens] | | | | |
| 96 | 366039979 | RING finger protein 213 isoform 3 | 113 | 497 | 61 | 308 |
| | | [Homo sapiens] | | | | |
| 65 | 126032348 | E3 ubiquitin-protein ligase HERC2 | 184 | 369 | 62 | 305 |
| | | [Homo sapiens] | | | | |
| 97 | 291190787 | probable E3 ubiquitin-protein ligase | 118 | 484 | 63 | 304 |
| | | MYCBP2 [Homo sapiens] | | | | |
| 98 | 13489087 | leukocyte elastase inhibitor [Homo sapiens] | 69 | 689 | 64 | 304 |
| 99 | 4504875 | kallikrein-1 preproprotein [Homo sapiens] | 568 | 228 | 65 | 300 |
| 41 | 7669492 | glyceraldehyde-3-phosphate | 35 | 1047 | 66 | 300 |
| | | dehydrogenase [Homo sapiens] | | | | |
| 42 | 10334859 | creatine kinase U-type mitochondrial | 599 | 223 | 67 | 298 |
| | | precursor [Homo sapiens] | | | | |
| 100 | 19115954 | dynein heavy chain 5 axonemal [Homo sapiens] | 125 | 472 | 68 | 292 |
| 101 | 118918407 | nesprin-2 isoform 5 [Homo sapiens] | 0 | 0 | 69 | 291 |
| 102 | 47078295 | adenosine deaminase [Homo sapiens] | 58 | 753 | 70 | 290 |
| 103 | 223555935 | dynein heavy chain 14 axonemal | 193 | 367 | 71 | 289 |
| | | isoform 1 [Homo sapiens] | | | | |
| 104 | 13654237 | DNA-dependent protein kinase catalytic | 0 | 0 | 72 | 288 |
| | | subunit isoform 1 [Homo sapiens] | | | | |
| 105 | 110349721 | titin isoform novex-3 [Homo sapiens] | 143 | 441 | 73 | 287 |
| 106 | 119395734 | breast cancer type 2 susceptibility | 239 | 327 | 74 | 286 |
| | | protein [Homo sapiens] | | | | |
| 35 | 223942069 | enteropeptidase precursor [Homo sapiens] | 59 | 752 | 75 | 285 |
| 107 | 91199540 | dihydrolipoyl dehydrogenase | 352 | 274 | 76 | 284 |
| | | mitochondrial precursor [Homo sapiens] | | | | |
| 108 | 91718902 | histone-lysine N-methyltransferase | 181 | 375 | 77 | 283 |
| | | MLL3 [Homo sapiens] | | | | |
| 57 | 106507261 | pancreatic lipase-related protein 2 | 2178 | 122 | 78 | 281 |
| | | precursor [Homo sapiens] | | | | |
| 109 | 119703749 | hydrocephalus-inducing protein | 172 | 386 | 79 | 281 |
| | | homolog isoform a [Homo sapiens] | | | | |
| 110 | 125788 | RecName: Full = Ig kappa chain V-II | 89 | 557 | 80 | 272 |
| | | region TEW | | | | |
| 111 | 33350932 | cytoplasmic dynein 1 heavy chain 1 | 136 | 451 | 81 | 272 |
| | | [Homo sapiens] | | | | |
| 112 | 116063573 | filamin-A isoform 1 [Homo sapiens] | 399 | 262 | 82 | 271 |
| 113 | 150418007 | E3 SUMO-protein ligase RanBP2 [Homo sapiens] | 395 | 262 | 83 | 271 |
| 114 | 31657092 | ATP-binding cassette sub-family A | 183 | 370 | 84 | 271 |
| | | member 13 [Homo sapiens] | | | | |
| 115 | 150378539 | protein piccolo isoform 1 [Homo sapiens] | 127 | 467 | 85 | 270 |
| 27 | 105990532 | apolipoprotein B-100 precursor | 148 | 424 | 86 | 269 |
| | | [Homo sapiens] | | | | |
| 116 | 54607053 | translational activator GCN1 [Homo sapiens] | 354 | 272 | 87 | 266 |
| 117 | 256017163 | MAX gene-associated protein isoform 1 | 0 | 0 | 88 | 266 |
| | | [Homo sapiens] | | | | |
| 118 | 120587023 | small subunit processome component 20 | 502 | 238 | 89 | 265 |
| | | homolog [Homo sapiens] | | | | |
| 119 | 41322923 | plectin isoform 1a [Homo sapiens] | 0 | 0 | 90 | 265 |
| 120 | 226529917 | triosephosphate isomerase isoform 2 | 87 | 560 | 91 | 264 |
| | | [Homo sapiens] | | | | |
| 121 | 18375650 | tyrosine-protein phosphatase non- | 247 | 322 | 92 | 264 |
| | | receptor type 13 isoform 4 [Homo sapiens] | | | | |
| 122 | 126131099 | probable E3 ubiquitin-protein ligase | 115 | 490 | 93 | 264 |
| | | HERC1 [Homo sapiens] | | | | |
| 123 | 34577049 | bullous pemphigoid antigen 1 isoform | 121 | 479 | 94 | 263 |
| | | 1eA precursor [Homo sapiens] | | | | |
| 61 | 32967601 | ankyrin-3 isoform 1 [Homo sapiens] | 156 | 408 | 95 | 260 |
| 124 | 93102379 | low-density lipoprotein receptor-related | 314 | 289 | 96 | 259 |
| | | protein 1B precursor [Homo sapiens] | | | | |
| 125 | 118498345 | zinc finger homeobox protein 3 isoform | 345 | 277 | 97 | 258 |
| | | A [Homo sapiens] | | | | |
| 126 | 359718912 | probable E3 ubiquitin-protein ligase | 191 | 367 | 98 | 257 |
| | | C12orf51 [Homo sapiens] | | | | |
| 127 | 115527120 | nebulin isoform 3 [Homo sapiens] | 116 | 486 | 99 | 255 |
| 128 | 28559088 | laminin subunit alpha-2 isoform a | 323 | 284 | 100 | 255 |
| | | precursor [Homo sapiens] | | | | |
| 129 | 171184451 | centrosome-associated protein 350 | 317 | 287 | 101 | 252 |
| | | [Homo sapiens] | | | | |
| 130 | 221316593 | cadherin-17 precursor [Homo sapiens] | 262 | 316 | 102 | 252 |
| 131 | 150378498 | uncharacterized protein KIAA1109 | 74 | 609 | 103 | 252 |
| | | [Homo sapiens] | | | | |
| 34 | 157266292 | intestinal-type alkaline phosphatase | 153 | 413 | 104 | 251 |
| | | precursor [Homo sapiens] | | | | |
| 132 | 332688227 | dynein heavy chain 8 axonemal [Homo sapiens] | 209 | 351 | 105 | 251 |
| 133 | 62241003 | cardiomyopathy-associated protein 5 | 120 | 479 | 106 | 249 |
| | | [Homo sapiens] | | | | |
| 134 | 114155133 | dynein heavy chain 9 axonemal isoform | 155 | 412 | 107 | 249 |
| | | 2 [Homo sapiens] | | | | |
| 135 | 341913678 | PREDICTED: cadherin-23-like isoform | 197 | 365 | 108 | 247 |
| | | 1 [Homo sapiens] | | | | |
| 136 | 24415404 | midasin [Homo sapiens] | 114 | 496 | 109 | 247 |
| 137 | 88501738 | TRIO and F-actin-binding protein | 394 | 262 | 110 | 247 |
| | | isoform 6 [Homo sapiens] | | | | |
| 138 | 112799847 | ryanodine receptor 2 [Homo sapiens] | 138 | 449 | 111 | 247 |
| 139 | 122937398 | cytoplasmic dynein 2 heavy chain 1 | 0 | 0 | 112 | 246 |
| | | isoform 2 [Homo sapiens] | | | | |
| 140 | 122937514 | protein unc-13 homolog C [Homo sapiens] | 218 | 347 | 113 | 246 |
| 141 | 87196343 | PDZ domain-containing protein 2 | 316 | 289 | 114 | 245 |
| | | [Homo sapiens] | | | | |
| 142 | 256542310 | dynein heavy chain 17 axonemal [Homo sapiens] | 166 | 392 | 115 | 243 |
| 143 | 120587025 | SH3 and multiple ankyrin repeat | 441 | 250 | 116 | 241 |
| | | domains protein 1 [Homo sapiens] | | | | |
| 144 | 153792694 | baculoviral IAP repeat-containing | 189 | 368 | 117 | 240 |
| | | protein 6 [Homo sapiens] | | | | |
| 145 | 270265793 | stAR-related lipid transfer protein 9 | 164 | 394 | 118 | 240 |
| | | [Homo sapiens] | | | | |
| 146 | 38455402 | neutrophil gelatinase-associated | 83 | 565 | 119 | 240 |
| | | lipocalin precursor [Homo sapiens] | | | | |
| 147 | 5031863 | galectin-3-binding protein precursor | 91 | 551 | 120 | 239 |
| | | [Homo sapiens] | | | | |
| 148 | 22538387 | A-kinase anchor protein 9 isoform 2 | 201 | 362 | 121 | 239 |
| | | [Homo sapiens] | | | | |
| 149 | 257743023 | nebulin isoform 1 [Homo sapiens] | 0 | 0 | 122 | 239 |
| 150 | 55743098 | collagen alpha-3(VI) chain isoform 1 | 214 | 349 | 123 | 239 |
| | | precursor [Homo sapiens] | | | | |
| 151 | 306922386 | adenomatous polyposis coli protein | 0 | 0 | 124 | 237 |
| | | isoform a [Homo sapiens] | | | | |
| 152 | 295986608 | immunoglobulin lambda-like | 30 | 1193 | 125 | 236 |
| | | polypeptide 5 isoform 1 [Homo sapiens] | | | | |
| 153 | 121047 | RecName: Full = Ig gamma-4 chain C region | 102 | 528 | 126 | 234 |
| 154 | 169658378 | trinucleotide repeat-containing gene 18 | 393 | 263 | 127 | 233 |
| | | protein [Homo sapiens] | | | | |
| 155 | 149363685 | uncharacterized protein KIAA0947 | 901 | 186 | 128 | 232 |
| | | [Homo sapiens] | | | | |
| 156 | 113204617 | ryanodine receptor 1 isoform 2 [Homo sapiens] | 0 | 0 | 129 | 231 |
| 157 | 54607139 | vacuolar protein sorting-associated | 145 | 429 | 130 | 227 |
| | | protein 13D isoform 1 [Homo sapiens] | | | | |
| 158 | 4501901 | aminoacylase-1 isoform a [Homo sapiens] | 0 | 0 | 131 | 225 |
| 159 | 1730075 | RecName: Full = Ig kappa chain V-IV | 103 | 523 | 132 | 224 |
| | | region Len | | | | |
| 160 | 38788274 | nucleosome-remodeling factor subunit | 380 | 265 | 133 | 223 |
| | | BPTF isoform 1 [Homo sapiens] | | | | |
| 161 | 119120894 | dmX-like protein 2 isoform 2 [Homo sapiens] | 483 | 243 | 134 | 223 |
| 162 | 93141047 | collagen alpha-1(XII) chain long | 558 | 229 | 135 | 222 |
| | | isoform precursor [Homo sapiens] | | | | |
| 163 | 14790190 | msx2-interacting protein [Homo sapiens] | 285 | 306 | 136 | 221 |
| 164 | 194353966 | dynein heavy chain 6 axonemal [Homo sapiens] | 299 | 300 | 137 | 220 |
| 165 | 197313748 | histone-lysine N-methyltransferase | 246 | 323 | 138 | 220 |
| | | SETD2 [Homo sapiens] | | | | |
| 166 | 4502961 | collagen alpha-1(VII) chain precursor | 126 | 468 | 139 | 219 |
| | | [Homo sapiens] | | | | |
| 167 | 331284180 | nuclear receptor corepressor 2 isoform 3 | 0 | 0 | 140 | 219 |
| | | [Homo sapiens] | | | | |
| 168 | 165932370 | protocadherin Fat 4 precursor [Homo sapiens] | 206 | 356 | 141 | 219 |
| 169 | 198442844 | dynein heavy chain 10 axonemal [Homo sapiens] | 142 | 443 | 142 | 218 |
| 170 | 87196339 | collagen alpha-1(VI) chain precursor | 911 | 185 | 143 | 217 |
| | | [Homo sapiens] | | | | |
| 171 | 223633988 | uncharacterized protein KIAA1671 | 298 | 300 | 144 | 217 |
| | | [Homo sapiens] | | | | |
| 172 | 16933557 | protocadherin-16 precursor [Homo sapiens] | 327 | 283 | 145 | 217 |
| 173 | 222144249 | dynein heavy chain domain-containing | 263 | 315 | 146 | 216 |
| | | protein 1 isoform 1 [Homo sapiens] | | | | |
| 174 | 66347828 | vacuolar protein sorting-associated | 240 | 326 | 147 | 216 |
| | | protein 13C isoform 2A [Homo sapiens] | | | | |
| 175 | 113722133 | probable helicase senataxin [Homo sapiens] | 963 | 181 | 148 | 216 |
| 176 | 126012573 | low-density lipoprotein receptor-related | 215 | 349 | 149 | 215 |
| | | protein 2 precursor [Homo sapiens] | | | | |
| 177 | 118498337 | E3 ubiquitin-protein ligase HECTD1 | 296 | 301 | 150 | 215 |
| | | [Homo sapiens] | | | | |
| 178 | 4505847 | phospholipase A2 precursor [Homo sapiens] | 351 | 274 | 151 | 214 |
| 179 | 126116589 | fibrocystin-L precursor [Homo sapiens] | 280 | 307 | 152 | 214 |
| 180 | 169177000 | PREDICTED: LOW QUALITY | 157 | 406 | 153 | 214 |
| | | PROTEIN: hemicentin-2 [Homo sapiens] | | | | |
| 181 | 31563330 | A-kinase anchor protein 13 isoform 1 | 304 | 293 | 154 | 213 |
| | | [Homo sapiens] | | | | |
| 182 | 79749430 | FRAS1-related extracellular matrix | 198 | 364 | 155 | 213 |
| | | protein 2 precursor [Homo sapiens] | | | | |
| 183 | 91208420 | protein bassoon [Homo sapiens] | 137 | 450 | 156 | 212 |
| 184 | 20336205 | transcriptional regulator ATRX isoform | 0 | 0 | 157 | 211 |
| | | 2 [Homo sapiens] | | | | |
| 185 | 81295809 | pericentrin [Homo sapiens] | 135 | 451 | 158 | 211 |
| 186 | 45545421 | ectonucleotide pyrophosphatase/ | 133 | 453 | 159 | 211 |
| | | phosphodiesterase family member 7 | | | | |
| | | precursor [Homo sapiens] | | | | |
| 187 | 296011010 | protein FAM208B [Homo sapiens] | 373 | 267 | 160 | 210 |
| 188 | 82659109 | E3 ubiquitin-protein ligase UBR4 | 128 | 467 | 161 | 210 |
| | | [Homo sapiens] | | | | |
| 189 | 169178458 | PREDICTED: LOW QUALITY | 170 | 390 | 162 | 209 |
| | | PROTEIN: hemicentin-2 [Homo sapiens] | | | | |
| 190 | 116805322 | filamin-C isoform a [Homo sapiens] | 0 | 0 | 163 | 209 |
| 191 | 4557793 | neurofibromin isoform 2 [Homo sapiens] | 0 | 0 | 164 | 209 |
| 192 | 45827701 | protein dopey-2 [Homo sapiens] | 548 | 231 | 165 | 209 |
| 193 | 149158690 | protein PRRC2A [Homo sapiens] | 916 | 185 | 166 | 208 |
| 194 | 35493701 | vacuolar protein sorting-associated | 253 | 320 | 167 | 207 |
| | | protein 13B isoform 1 [Homo sapiens] | | | | |
| 195 | 15147337 | E3 ubiquitin-protein ligase UBR5 | 163 | 395 | 168 | 207 |
| | | [Homo sapiens] | | | | |
| 196 | 139948432 | matrix-remodeling-associated protein 5 | 217 | 347 | 169 | 206 |
| | | precursor [Homo sapiens] | | | | |
| 197 | 87299628 | biorientation of chromosomes in cell | 213 | 350 | 170 | 206 |
| | | division protein 1-like [Homo sapiens] | | | | |
| 198 | 89363017 | collagen alpha-2(V) chain preproprotein | 744 | 200 | 171 | 206 |
| | | [Homo sapiens] | | | | |
| 199 | 126131102 | fibrocystin isoform 1 precursor [Homo sapiens] | 223 | 342 | 172 | 205 |
| 200 | 61676188 | E3 ubiquitin-protein ligase HUWE1 | 292 | 303 | 173 | 204 |
| | | [Homo sapiens] | | | | |
| 201 | 55770834 | centromere protein F [Homo sapiens] | 174 | 384 | 174 | 204 |
| 202 | 157266317 | serine/threonine-protein kinase ATR | 402 | 261 | 175 | 204 |
| | | [Homo sapiens] | | | | |
| 203 | 105990541 | retinal-specific ATP-binding cassette | 863 | 189 | 176 | 204 |
| | | transporter [Homo sapiens] | | | | |
| 204 | 51479173 | dynein heavy chain 11 axonemal | 196 | 366 | 177 | 204 |
| | | [Homo sapiens] | | | | |
| 205 | 56550039 | histone-lysine N-methyltransferase MLL | 168 | 390 | 178 | 204 |
| | | isoform 2 precursor [Homo sapiens] | | | | |
| 206 | 170296790 | trypsin-3 isoform 1 preproprotein | 567 | 228 | 179 | 203 |
| | | [Homo sapiens] | | | | |
| 207 | 51317366 | myosin-XVIIIb [Homo sapiens] | 319 | 286 | 180 | 202 |
| 208 | 47717123 | intersectin-1 isoform ITSN-1 [Homo sapiens] | 462 | 247 | 181 | 202 |
| 209 | 4502443 | bullous pemphigoid antigen 1 isoform | 0 | 0 | 182 | 202 |
| | | 1e precursor [Homo sapiens] | | | | |
| 210 | 62243658 | serine/threonine-protein kinase SMG1 | 219 | 346 | 183 | 202 |
| | | [Homo sapiens] | | | | |
| 211 | 66346672 | vacuolar protein sorting-associated | 0 | 0 | 184 | 202 |
| | | protein 13A isoform C [Homo sapiens] | | | | |
| 212 | 111118976 | collagen alpha-1(II) chain isoform 1 | 369 | 267 | 185 | 201 |
| | | precursor [Homo sapiens] | | | | |
| 213 | 121583483 | 1-phosphatidylinositol-3-phosphate 5- | 312 | 290 | 186 | 201 |
| | | kinase isoform 2 [Homo sapiens] | | | | |
| 214 | 75677365 | dynein heavy chain 2 axonemal [Homo sapiens] | 282 | 306 | 187 | 200 |
| 215 | 27436938 | reelin isoform a precursor [Homo sapiens] | 0 | 0 | 188 | 200 |
| 216 | 21264602 | laminin subunit alpha-5 precursor | 457 | 247 | 189 | 200 |
| | | [Homo sapiens] | | | | |
| 217 | 257467639 | uncharacterized protein KIAA0889 | 1244 | 163 | 190 | 200 |
| | | isoform 1 [Homo sapiens] | | | | |
| 218 | 110349772 | collagen alpha-1(I) chain preproprotein | 492 | 240 | 192 | 199 |
| | | [Homo sapiens] | | | | |
| 219 | 119372317 | xin actin-binding repeat-containing | 194 | 366 | 193 | 199 |
| | | protein 2 isoform 1 [Homo sapiens] | | | | |
| 220 | 134268640 | alpha-tectorin precursor [Homo sapiens] | 404 | 260 | 194 | 199 |
| 19 | 116284392 | mucin-2 precursor [Homo sapiens] | 75 | 600 | 195 | 199 |
| 221 | 92110053 | CUB and sushi domain-containing | 274 | 310 | 196 | 198 |
| | | protein 2 [Homo sapiens] | | | | |
| 222 | 291167749 | zinc finger homeobox protein 4 [Homo sapiens] | 203 | 359 | 198 | 198 |
| 223 | 223029410 | talin-1 [Homo sapiens] | 281 | 307 | 200 | 197 |
| 224 | 52426735 | ankyrin-2 isoform 1 [Homo sapiens] | 160 | 398 | 201 | 196 |
| 225 | 148746189 | multiple PDZ domain protein [Homo sapiens] | 396 | 262 | 202 | 196 |
| 226 | 109633039 | receptor-type tyrosine-protein phosphatase F | 709 | 205 | 204 | 196 |
| | | isoform 2 precursor [Homo sapiens] | | | | |
| 227 | 7656967 | cadherin EGF LAG seven-pass G-type | 560 | 229 | 205 | 196 |
| | | receptor 1 precursor [Homo sapiens] | | | | |
| 228 | 239735519 | myotubularin-related protein 5 [Homo sapiens] | 342 | 278 | 206 | 196 |
| 229 | 45439359 | triple functional domain protein | 268 | 313 | 207 | 195 |
| | | [Homo sapiens] | | | | |
| 230 | 41152086 | serpin B6 [Homo sapiens] | 55 | 775 | 208 | 195 |
| 231 | 256000767 | extracellular matrix protein FRAS1 | 470 | 245 | 209 | 195 |
| | | isoform 1 precursor [Homo sapiens] | | | | |
| 232 | 19923586 | histone-lysine N-methyltransferase H3 | 300 | 300 | 210 | 195 |
| | | lysine-36 and H4 lysine-20 specific | | | | |
| | | isoform b [Homo sapiens] | | | | |
| 233 | 118572613 | serine/arginine repetitive matrix protein | 465 | 246 | 211 | 194 |
| | | 2 [Homo sapiens] | | | | |
| 234 | 153792012 | DNA polymerase zeta catalytic subunit | 278 | 308 | 213 | 193 |
| | | [Homo sapiens] | | | | |
| 235 | 149192855 | protein PRRC2B [Homo sapiens] | 340 | 278 | 214 | 193 |
| 236 | 67782321 | spectrin beta chain erythrocyte isoform | 453 | 248 | 215 | 192 |
| | | a [Homo sapiens] | | | | |
| 237 | 126116596 | abnormal spindle-like microcephaly- | 250 | 322 | 216 | 192 |
| | | associated protein isoform 1 [Homo sapiens] | | | | |
| 238 | 242332527 | hypothetical protein LOC65250 [Homo sapiens] | 353 | 272 | 217 | 192 |
| 239 | 149589008 | xaa-Pro dipeptidase isoform 1 [Homo sapiens] | 543 | 232 | 218 | 192 |
| 240 | 38788416 | laminin subunit alpha-1 precursor | 341 | 278 | 219 | 191 |
| | | [Homo sapiens] | | | | |
| 241 | 150418009 | transforming acidic coiled-coil-containing | 424 | 254 | 220 | 191 |
| | | protein 2 isoform a [Homo sapiens] | | | | |
| 242 | 4502951 | collagen alpha-1(III) chain preproprotein | 613 | 221 | 222 | 191 |
| | | [Homo sapiens] | | | | |
| 243 | 365192532 | myosin-10 isoform 1 [Homo sapiens] | 408 | 259 | 223 | 191 |
| 244 | 16445436 | bromodomain and WD repeat-containing | 495 | 240 | 224 | 191 |
| | | protein 1 isoform A [Homo sapiens] | | | | |
| 245 | 110349786 | Alstrom syndrome protein 1 [Homo sapiens] | 131 | 454 | 225 | 190 |
| 246 | 207452735 | epiplakin [Homo sapiens] | 412 | 257 | 226 | 190 |
| 247 | 153945846 | inositol 1 4 5-trisphosphate receptor | 307 | 293 | 228 | 189 |
| | | type 3 [Homo sapiens] | | | | |
| 248 | 221316747 | exophilin-5 [Homo sapiens] | 419 | 256 | 229 | 188 |
| 249 | 260064009 | ubiquitin carboxyl-terminal hydrolase 24 | 273 | 310 | 230 | 188 |
| | | [Homo sapiens] | | | | |
| 250 | 310114187 | PREDICTED: ankyrin repeat domain- | 468 | 245 | 231 | 188 |
| | | containing protein 36A [Homo sapiens] | | | | |
| 251 | 66346693 | protocadherin Fat 1 precursor | 185 | 369 | 232 | 188 |
| | | [Homo sapiens] | | | | |
| 252 | 188536004 | zinc finger protein 469 [Homo sapiens] | 122 | 479 | 233 | 188 |
| 253 | 157785645 | striated muscle preferentially expressed | 256 | 318 | 234 | 187 |
| | | protein kinase isoform 1 [Homo sapiens] | | | | |
| 254 | 38045910 | laminin subunit alpha-3 isoform 1 | 187 | 369 | 235 | 187 |
| | | precursor [Homo sapiens] | | | | |
| 255 | 26080431 | ATPase family AAA domain-containing | 360 | 270 | 236 | 187 |
| | | protein 5 [Homo sapiens] | | | | |
| 256 | 4503355 | dedicator of cytokinesis protein 1 | 413 | 257 | 238 | 186 |
| | | [Homo sapiens] | | | | |
| 257 | 259013213 | CUB and sushi domain-containing | 295 | 301 | 239 | 186 |
| | | protein 1 precursor [Homo sapiens] | | | | |
| 258 | 148886654 | sushi von Willebrand factor type A | 248 | 322 | 240 | 186 |
| | | EGF and pentraxin domain-containing | | | | |
| | | protein 1 precursor [Homo sapiens] | | | | |
| 259 | 54292123 | lysosomal-trafficking regulator | 228 | 336 | 241 | 186 |
| | | [Homo sapiens] | | | | |
| 260 | 110735435 | collagen alpha-3(V) chain preproprotein | 265 | 314 | 242 | 185 |
| | | [Homo sapiens] | | | | |
| 261 | 122891870 | melanoma inhibitory activity protein 3 | 421 | 256 | 243 | 185 |
| | | precursor [Homo sapiens] | | | | |
| 262 | 21264565 | AT-rich interactive domain-containing | 686 | 208 | 244 | 185 |
| | | protein 1A isoform a [Homo sapiens] | | | | |
| 263 | 38202205 | zinc finger FYVE domain-containing | 407 | 259 | 245 | 184 |
| | | protein 26 [Homo sapiens] | | | | |
| 264 | 13787217 | protocadherin Fat 2 precursor [Homo sapiens] | 241 | 326 | 246 | 184 |
| 265 | 24308169 | dynein heavy chain 3 axonemal [Homo sapiens] | 212 | 350 | 248 | 183 |
| 266 | 62177127 | myosin-XVI isoform 2 [Homo sapiens] | 506 | 237 | 249 | 183 |
| 267 | 224028289 | tetratricopeptide repeat protein 28 | 222 | 342 | 250 | 183 |
| | | [Homo sapiens] | | | | |
| 268 | 126723564 | pecanex-like protein 1 [Homo sapiens] | 382 | 265 | 251 | 183 |
| 269 | 12667788 | myosin-9 [Homo sapiens] | 227 | 337 | 252 | 183 |
| 270 | 126012571 | basement membrane-specific heparan | 186 | 369 | 253 | 182 |
| | | sulfate proteoglycan core protein | | | | |
| | | precursor [Homo sapiens] | | | | |
| 271 | 5031587 | adenomatous polyposis coli protein 2 | 397 | 262 | 255 | 181 |
| | | [Homo sapiens] | | | | |
| 272 | 92091572 | dedicator of cytokinesis protein 4 | 531 | 233 | 256 | 181 |
| | | [Homo sapiens] | | | | |
| 273 | 10863903 | probable E3 ubiquitin-protein ligase | 500 | 239 | 258 | 181 |
| | | TRIP 12 [Homo sapiens] | | | | |
| 274 | 90903231 | huntingtin [Homo sapiens] | 326 | 283 | 259 | 180 |
| 275 | 156104874 | envoplakin [Homo sapiens] | 315 | 289 | 263 | 179 |
| 276 | 73747881 | zinc finger ZZ-type and EF-hand | 308 | 293 | 264 | 179 |
| | | domain-containing protein 1 [Homo sapiens] | | | | |
| 277 | 150170699 | kinesin-like protein KIF26A [Homo sapiens] | 444 | 249 | 265 | 179 |
| 278 | 13325064 | cadherin EGF LAG seven-pass G-type | 286 | 305 | 267 | 178 |
| | | receptor 2 precursor [Homo sapiens] | | | | |
| 279 | 281485550 | fibrillin-1 precursor [Homo sapiens] | 632 | 217 | 268 | 178 |
| 44 | 110618248 | cadherin-related family member 5 | 107 | 511 | 271 | 177 |
| | | isoform 1 precursor [Homo sapiens] | | | | |
| 280 | 54873613 | agrin precursor [Homo sapiens] | 368 | 267 | 272 | 177 |
| 281 | 169790825 | teneurin-4 [Homo sapiens] | 313 | 289 | 273 | 177 |
| 282 | 150456444 | protein unc-79 homolog [Homo sapiens] | 329 | 282 | 274 | 177 |
| 283 | 148762940 | protein Daple [Homo sapiens] | 724 | 202 | 275 | 177 |
| 284 | 119964726 | cation-independent mannose-6-phosphate | 236 | 329 | 276 | 177 |
| | | receptor precursor [Homo sapiens] | | | | |
| 285 | 154354990 | ankyrin repeat domain-containing | 365 | 269 | 277 | 176 |
| | | protein 26 isoform 1 [Homo sapiens] | | | | |
| 286 | 62422577 | neurobeachin isoform 1 [Homo sapiens] | 410 | 258 | 279 | 176 |
| 287 | 148886692 | protocadherin Fat 3 precursor [Homo sapiens] | 290 | 303 | 281 | 175 |
| 14 | 29725633 | lithostathine-1-alpha precursor | 71 | 643 | 282 | 174 |
| | | [Homo sapiens] | | | | |
| 288 | 224458301 | protein FAM186A [Homo sapiens] | 696 | 207 | 284 | 174 |
| 289 | 7662046 | histone-lysine N-methyltransferase | 372 | 267 | 285 | 174 |
| | | MLL4 [Homo sapiens] | | | | |
| 290 | 95147335 | inositol 1 4 5-trisphosphate receptor | 288 | 304 | 286 | 174 |
| | | type 2 [Homo sapiens] | | | | |
| 291 | 54112403 | chromodomain-helicase-DNA-binding | 356 | 272 | 287 | 173 |
| | | protein 7 [Homo sapiens] | | | | |
| 292 | 191252801 | WD repeat- and FYVE domain- | 226 | 339 | 288 | 173 |
| | | containing protein 4 [Homo sapiens] | | | | |
| 24 | 66932947 | alpha-2-macroglobulin precursor | 32 | 1169 | 290 | 173 |
| | | [Homo sapiens] | | | | |
| 293 | 89276751 | collagen alpha-1(V) chain preproprotein | 336 | 280 | 291 | 173 |
| | | [Homo sapiens] | | | | |
| 294 | 255003833 | centrosomal protein of 192 kDa [Homo sapiens] | 325 | 283 | 294 | 172 |
| 295 | 50659080 | alpha-1-antichymotrypsin precursor | 23 | 1465 | 295 | 172 |
| | | [Homo sapiens] | | | | |
| 296 | 183583553 | collagen alpha-5(VI) chain precursor | 192 | 367 | 296 | 171 |
| | | [Homo sapiens] | | | | |
| 297 | 41054864 | regulating synaptic membrane exocytosis | 423 | 255 | 298 | 171 |
| | | protein 1 isoform 1 [Homo sapiens] | | | | |
| 298 | 301172750 | mucin-5B precursor [Homo sapiens] | 93 | 549 | 301 | 171 |
| 299 | 114842389 | myosin-7B [Homo sapiens] | 357 | 271 | 302 | 171 |
| 300 | 197927452 | dynein heavy chain 1 axonemal [Homo sapiens] | 165 | 393 | 305 | 170 |
| 301 | 110611228 | utrophin [Homo sapiens] | 208 | 353 | 306 | 170 |
| 302 | 55749742 | HEAT repeat-containing protein 5B | 302 | 297 | 307 | 170 |
| | | [Homo sapiens] | | | | |
| 303 | 117606355 | protein furry homolog [Homo sapiens] | 271 | 311 | 308 | 170 |
| 304 | 282165704 | chromodomain-helicase-DNA-binding | 237 | 329 | 310 | 169 |
| | | protein 8 isoform 1 [Homo sapiens] | | | | |
| 305 | 306922394 | zinc finger homeobox protein 2 [Homo sapiens] | 249 | 322 | 314 | 168 |
| 306 | 95147555 | microtubule-associated protein 1A | 272 | 310 | 316 | 168 |
| | | [Homo sapiens] | | | | |
| 307 | 359385708 | uncharacterized protein C10orf92 | 486 | 242 | 317 | 168 |
| | | [Homo sapiens] | | | | |
| 308 | 126012562 | prolow-density lipoprotein receptor- | 348 | 275 | 318 | 168 |
| | | related protein 1 precursor [Homo sapiens] | | | | |
| 309 | 332634937 | myomegalin isoform 9 [Homo sapiens] | 426 | 254 | 319 | 168 |
| 310 | 118402590 | myosin-XV [Homo sapiens] | 230 | 334 | 321 | 168 |
| 311 | 156938343 | talin-2 [Homo sapiens] | 294 | 302 | 323 | 167 |
| 312 | 126091152 | cubilin precursor [Homo sapiens] | 403 | 261 | 325 | 167 |
| 313 | 219842266 | usherin isoform B [Homo sapiens] | 277 | 308 | 326 | 167 |
| 314 | 57222563 | cytoskeleton-associated protein 5 | 409 | 259 | 330 | 167 |
| | | isoform b [Homo sapiens] | | | | |
| 315 | 148596944 | C2 domain-containing protein 3 [Homo sapiens] | 610 | 221 | 332 | 167 |
| 316 | 126032338 | ryanodine receptor 3 isoform 1 [Homo sapiens] | 149 | 424 | 333 | 166 |
| 317 | 87116683 | zinc finger C3H1 domain-containing | 671 | 211 | 336 | 165 |
| | | protein [Homo sapiens] | | | | |
| 318 | 56676397 | ankyrin repeat domain-containing | 676 | 209 | 337 | 165 |
| | | protein 11 [Homo sapiens] | | | | |
| 319 | 109255228 | centrosomal protein of 170 kDa isoform | 370 | 267 | 338 | 165 |
| | | alpha [Homo sapiens] | | | | |
| 320 | 122937512 | myosin-VIIb [Homo sapiens] | 416 | 257 | 340 | 164 |
| 321 | 188528648 | tenascin-X isoform 1 precursor [Homo sapiens] | 330 | 281 | 341 | 164 |
| 322 | 221219020 | WD repeat-containing protein 87 | 640 | 215 | 342 | 164 |
| | | [Homo sapiens] | | | | |
| 323 | 49640009 | E3 ubiquitin-protein ligase TTC3 | 371 | 267 | 344 | 164 |
| | | [Homo sapiens] | | | | |
| 324 | 109637791 | transcription factor TFIIIB component | 267 | 314 | 345 | 164 |
| | | B″ homolog [Homo sapiens] | | | | |
| 325 | 37620163 | ANKHD1-EIF4EBP3 protein [Homo sapiens] | 428 | 254 | 346 | 164 |
| 326 | 21626468 | zinc finger protein 638 isoform 1 | 692 | 208 | 347 | 164 |
| | | [Homo sapiens] | | | | |
| 327 | 116256356 | collagen alpha-4(IV) chain precursor | 732 | 201 | 352 | 163 |
| | | [Homo sapiens] | | | | |
| 328 | 310110158 | PREDICTED: otogelin isoform 1 [Homo sapiens] | 739 | 201 | 353 | 163 |
| 329 | 71061468 | centromere-associated protein E | 238 | 328 | 356 | 162 |
| | | [Homo sapiens] | | | | |
| 330 | 123853 | RecName: Full = Ig heavy chain V-III | 139 | 448 | 357 | 162 |
| | | region POM | | | | |
| 331 | 115430237 | spectrin beta chain brain 3 isoform | 242 | 325 | 358 | 162 |
| | | sigma1 [Homo sapiens] | | | | |
| 332 | 145309304 | cadherin EGF LAG seven-pass G-type | 235 | 330 | 360 | 162 |
| | | receptor 3 precursor [Homo sapiens] | | | | |
| 333 | 144226847 | obscurin-like protein 1 isoform 1 | 513 | 235 | 362 | 161 |
| | | precursor [Homo sapiens] | | | | |
| 334 | 40217847 | U5 small nuclear ribonucleoprotein 200 | 386 | 264 | 363 | 161 |
| | | kDa helicase [Homo sapiens] | | | | |
| 335 | 93352554 | probable G-protein coupled receptor 179 | 629 | 218 | 365 | 161 |
| | | precursor [Homo sapiens] | | | | |
| 336 | 239050813 | lipoxygenase homology domain-containing | 259 | 316 | 366 | 161 |
| | | protein 1 isoform 1 [Homo sapiens] | | | | |
| 337 | 21359935 | Down syndrome cell adhesion molecule- | 668 | 211 | 367 | 161 |
| | | like protein 1 [Homo sapiens] | | | | |
| 338 | 40805823 | collagen alpha-1(XXII) chain precursor | 387 | 264 | 369 | 161 |
| | | [Homo sapiens] | | | | |
| 339 | 19913408 | DNA topoisomerase 2-beta [Homo sapiens] | 328 | 282 | 372 | 160 |
| 340 | 203098098 | protein Shroom3 [Homo sapiens] | 347 | 275 | 374 | 160 |
| 341 | 57232740 | N-acetylated-alpha-linked acidic | 73 | 612 | 375 | 160 |
| | | dipeptidase-like protein [Homo sapiens] | | | | |
| 342 | 30089962 | serine/threonine-protein kinase MRCK | 587 | 225 | 376 | 159 |
| | | alpha isoform B [Homo sapiens] | | | | |
| 48 | 4502517 | carbonic anhydrase 1 [Homo sapiens] | 670 | 211 | 377 | 159 |
| 343 | 237681119 | breast cancer type 1 susceptibility | 636 | 216 | 378 | 159 |
| | | protein isoform 2 [Homo sapiens] | | | | |
| 344 | 112421122 | dnaJ homolog subfamily C member 13 | 566 | 228 | 381 | 159 |
| | | [Homo sapiens] | | | | |
| 345 | 4507691 | transformation/transcription domain- | 244 | 324 | 382 | 159 |
| | | associated protein isoform 2 [Homo sapiens] | | | | |
| 346 | 89191868 | von Willebrand factor preproprotein | 438 | 250 | 385 | 158 |
| | | [Homo sapiens] | | | | |
| 347 | 125792 | RecName: Full = Ig kappa chain V-II | 140 | 446 | 387 | 157 |
| | | region RPMI 6410; Flags: Precursor | | | | |
| 348 | 29244924 | chromodomain-helicase-DNA-binding | 324 | 284 | 389 | 157 |
| | | protein 6 [Homo sapiens] | | | | |
| 349 | 104487006 | receptor-type tyrosine-protein phosphatase S | 750 | 200 | 391 | 157 |
| | | isoform 1 precursor [Homo sapiens] | | | | |
| 350 | 48762934 | collagen alpha-2(I) chain precursor | 224 | 339 | 392 | 157 |
| | | [Homo sapiens] | | | | |
| 351 | 38679967 | acetyl-CoA carboxylase 1 isoform 2 | 461 | 247 | 393 | 157 |
| | | [Homo sapiens] | | | | |
| 352 | 34740331 | otoferlin isoform a [Homo sapiens] | 635 | 217 | 395 | 156 |
| 353 | 134031945 | SCO-spondin precursor [Homo sapiens] | 332 | 280 | 396 | 156 |
| 354 | 71361682 | nuclear mitotic apparatus protein 1 | 216 | 347 | 397 | 156 |
| | | [Homo sapiens] | | | | |
| 355 | 71902540 | serine-protein kinase ATM [Homo sapiens] | 335 | 280 | 398 | 156 |
| 356 | 140560919 | myomesin-1 isoform a [Homo sapiens] | 293 | 303 | 399 | 156 |
| 357 | 150010558 | myosin-15 precursor [Homo sapiens] | 565 | 228 | 403 | 155 |
| 358 | 148536825 | collagen alpha-1(IV) chain | 497 | 239 | 404 | 155 |
| | | preproprotein [Homo sapiens] | | | | |
| 359 | 38683860 | insulin receptor substrate 2 [Homo sapiens] | 693 | 208 | 405 | 155 |
| 360 | 32481206 | lactase-phlorizin hydrolase | 43 | 909 | 406 | 154 |
| | | preproprotein [Homo sapiens] | | | | |
| 361 | 150170718 | zinc finger protein 292 [Homo sapiens] | 637 | 216 | 407 | 154 |
| 362 | 148528998 | dmX-like protein 1 [Homo sapiens] | 458 | 247 | 409 | 154 |
| 363 | 38045888 | CUB and sushi domain-containing | 283 | 306 | 410 | 154 |
| | | protein 3 isoform 1 [Homo sapiens] | | | | |
| 364 | 112734845 | collagen alpha-1(XX) chain precursor | 731 | 201 | 411 | 154 |
| | | [Homo sapiens] | | | | |
| 365 | 38093637 | Nance-Horan syndrome protein isoform | 431 | 252 | 414 | 153 |
| | | 1 [Homo sapiens] | | | | |
| 366 | 119220552 | protein sidekick-1 isoform 1 [Homo sapiens] | 398 | 262 | 415 | 153 |
| 367 | 148612838 | uncharacterized protein KIAA2026 | 375 | 266 | 416 | 152 |
| | | [Homo sapiens] | | | | |
| 368 | 95147342 | chromodomain-helicase-DNA-binding | 362 | 269 | 419 | 152 |
| | | protein 9 [Homo sapiens] | | | | |
| 369 | 110349788 | histone-lysine N-methyltransferase | 176 | 381 | 420 | 152 |
| | | ASH1L [Homo sapiens] | | | | |
| 370 | 254826809 | prematurely terminated mRNA decay | 569 | 228 | 423 | 152 |
| | | factor-like [Homo sapiens] | | | | |
| 371 | 150417973 | supervillin isoform 2 [Homo sapiens] | 434 | 251 | 425 | 151 |
| 372 | 148596992 | alpha-protein kinase 2 [Homo sapiens] | 602 | 222 | 426 | 151 |
| 373 | 209862789 | protein MICAL-3 isoform 1 [Homo sapiens] | 344 | 277 | 427 | 151 |
| 374 | 38490688 | immunoglobulin superfamily member | 279 | 307 | 430 | 151 |
| | | 10 isoform 1 precursor [Homo sapiens] | | | | |
| 375 | 134142826 | pericentriolar material 1 protein | 581 | 226 | 432 | 151 |
| | | [Homo sapiens] | | | | |
| 376 | 87578396 | microtubule-associated protein 2 | 522 | 234 | 434 | 151 |
| | | isoform 1 [Homo sapiens] | | | | |
| 377 | 134948558 | ankyrin repeat domain-containing | 728 | 202 | 435 | 150 |
| | | protein 12 isoform 1 [Homo sapiens] | | | | |
| 378 | 169658367 | BAH and coiled-coil domain-containing | 310 | 291 | 437 | 150 |
| | | protein 1 [Homo sapiens] | | | | |
| 379 | 4502337 | zinc-alpha-2-glycoprotein precursor | 50 | 836 | 438 | 150 |
| | | [Homo sapiens] | | | | |
| 380 | 119874201 | protein furry homolog-like [Homo sapiens] | 255 | 320 | 441 | 150 |
| 381 | 30794488 | kinesin-like protein KIF27 [Homo sapiens] | 401 | 261 | 442 | 150 |
| 382 | 257467648 | microtubule-associated serine/threonine- | 119 | 480 | 444 | 149 |
| | | protein kinase 4 isoform c [Homo sapiens] | | | | |
| 383 | 55956899 | keratin type I cytoskeletal 9 [Homo sapiens] | 100 | 528 | 445 | 149 |
| 384 | 58331187 | T-lymphoma invasion and metastasis- | 530 | 233 | 447 | 149 |
| | | inducing protein 2 isoform a [Homo sapiens] | | | | |
| 385 | 154350241 | brefeldin A-inhibited guanine nucleotide- | 625 | 218 | 448 | 149 |
| | | exchange protein 3 [Homo sapiens] | | | | |
| 386 | 262118282 | plexin-A1 precursor [Homo sapiens] | 690 | 208 | 451 | 148 |
| 387 | 21493045 | A-kinase anchor protein 6 [Homo sapiens] | 429 | 253 | 452 | 148 |
| 388 | 156105693 | peroxisomal proliferator-activated | 417 | 256 | 453 | 148 |
| | | receptor A-interacting complex 285 kDa | | | | |
| | | protein isoform 1 [Homo sapiens] | | | | |
| 389 | 194440727 | dynein heavy chain 12 axonemal | 199 | 363 | 456 | 148 |
| | | isoform 1 [Homo sapiens] | | | | |
| 390 | 335353804 | protein SZT2 [Homo sapiens] | 433 | 251 | 461 | 148 |
| 391 | 157738645 | plexin-A4 isoform 1 precursor [Homo sapiens] | 414 | 257 | 462 | 148 |
| 392 | 114431248 | basic helix-loop-helix domain-containing | 651 | 213 | 464 | 147 |
| | | protein KIAA2018 [Homo sapiens] | | | | |
| 393 | 371877632 | armadillo repeat-containing X-linked | 363 | 269 | 466 | 147 |
| | | protein 4 [Homo sapiens] | | | | |
| 394 | 116256354 | collagen alpha-2(IV) chain | 715 | 204 | 468 | 147 |
| | | preproprotein [Homo sapiens] | | | | |
| 395 | 145309309 | probable ubiquitin carboxyl-terminal | 322 | 284 | 469 | 147 |
| | | hydrolase FAF-X isoform 3 [Homo sapiens] | | | | |
| 396 | 47059046 | protocadherin-23 isoform 1 [Homo sapiens] | 547 | 231 | 476 | 147 |
| 397 | 115511036 | alpha-protein kinase 3 [Homo sapiens] | 746 | 200 | 478 | 146 |
| 398 | 87298937 | centriolin [Homo sapiens] | 367 | 267 | 480 | 146 |
| 399 | 267844811 | neuron navigator 1 isoform 1 [Homo sapiens] | 442 | 249 | 482 | 146 |
| 400 | 195972871 | 1-phosphatidylinositol-4 5-bisphosphate | 643 | 215 | 486 | 145 |
| | | phosphodiesterase eta-1 isoform a | | | | |
| | | [Homo sapiens] | | | | |
| 401 | 134142062 | acetyl-CoA carboxylase 2 precursor | 318 | 286 | 488 | 145 |
| | | [Homo sapiens] | | | | |
| 402 | 156104908 | myosin-6 [Homo sapiens] | 56 | 767 | 490 | 145 |
| 403 | 31563507 | GRIP and coiled-coil domain-containing | 638 | 216 | 492 | 145 |
| | | protein 2 [Homo sapiens] | | | | |
| 404 | 148233596 | lipopolysaccharide-responsive and | 605 | 222 | 495 | 144 |
| | | beige-like anchor protein isoform 2 | | | | |
| | | [Homo sapiens] | | | | |
| 405 | 262359929 | protein ELYS [Homo sapiens] | 188 | 369 | 497 | 144 |
| 406 | 154240686 | FYVE RhoGEF and PH domain- | 658 | 213 | 498 | 144 |
| | | containing protein 6 [Homo sapiens] | | | | |
| 407 | 110611226 | protein unc-13 homolog B [Homo sapiens] | 642 | 215 | 499 | 144 |
| 408 | 291190781 | leucine-rich repeat-containing protein | 749 | 200 | 500 | 144 |
| | | 16A isoform 1 [Homo sapiens] | | | | |
| 409 | 153791497 | rootletin [Homo sapiens] | 430 | 252 | 501 | 143 |
| 410 | 122937211 | proteasome-associated protein ECM29 | 710 | 205 | 503 | 143 |
| | | homolog [Homo sapiens] | | | | |
| 411 | 103472005 | antigen KI-67 isoform 1 [Homo sapiens] | 229 | 336 | 504 | 143 |
| 412 | 157738667 | FYVE and coiled-coil domain- | 563 | 228 | 507 | 143 |
| | | containing protein 1 [Homo sapiens] | | | | |
| 413 | 118600981 | probable JmjC domain-containing | 542 | 232 | 511 | 142 |
| | | histone demethylation protein 2C | | | | |
| | | isoform a [Homo sapiens] | | | | |
| 414 | 61743980 | stabilin-2 precursor [Homo sapiens] | 515 | 235 | 512 | 142 |
| 415 | 116534898 | desmoglein-2 preproprotein [Homo sapiens] | 685 | 209 | 515 | 142 |
| 416 | 115527097 | serine/threonine-protein kinase MRCK | 623 | 219 | 516 | 141 |
| | | beta [Homo sapiens] | | | | |
| 417 | 194294554 | SET-binding protein isoform a [Homo sapiens] | 425 | 254 | 517 | 141 |
| 418 | 110624781 | myosin-13 [Homo sapiens] | 364 | 269 | 520 | 140 |
| 419 | 149363642 | coiled-coil domain-containing protein | 519 | 235 | 522 | 140 |
| | | 144A [Homo sapiens] | | | | |
| 420 | 112821681 | G protein-regulated inducer of neurite | 551 | 231 | 523 | 140 |
| | | outgrowth 1 [Homo sapiens] | | | | |
| 421 | 58530840 | desmoplakin isoform I [Homo sapiens] | 305 | 293 | 525 | 140 |
| 422 | 74136549 | AT-rich interactive domain-containing | 627 | 218 | 526 | 139 |
| | | protein 5B isoform 1 [Homo sapiens] | | | | |
| 423 | 157426887 | dedicator of cytokinesis protein 6 | 538 | 232 | 527 | 139 |
| | | [Homo sapiens] | | | | |
| 424 | 71143119 | signal-induced proliferation-associated | 475 | 243 | 532 | 139 |
| | | 1-like protein 3 [Homo sapiens] | | | | |
| 425 | 94681049 | WD repeat-containing protein 96 | 507 | 237 | 534 | 139 |
| | | [Homo sapiens] | | | | |
| 426 | 146219843 | helicase SRCAP [Homo sapiens] | 350 | 274 | 538 | 139 |
| 427 | 56676335 | telomere-associated protein RIF1 | 346 | 276 | 542 | 138 |
| | | isoform 1 [Homo sapiens] | | | | |
| 428 | 53832009 | voltage-dependent T-type calcium | 630 | 218 | 543 | 138 |
| | | channel subunit alpha-1H isoform a | | | | |
| | | [Homo sapiens] | | | | |
| 429 | 148536869 | ninein isoform 2 [Homo sapiens] | 439 | 250 | 544 | 138 |
| 430 | 170016091 | teneurin-2 [Homo sapiens] | 275 | 308 | 551 | 137 |
| 431 | 183396804 | regulation of nuclear pre-mRNA domain- | 665 | 212 | 552 | 137 |
| | | containing protein 2 [Homo sapiens] | | | | |
| 432 | 205360962 | polycystin-1 isoform 2 precursor | 269 | 313 | 553 | 137 |
| | | [Homo sapiens] | | | | |
| 433 | 270133251 | amyotrophic lateral sclerosis 2 | 631 | 217 | 559 | 136 |
| | | chromosomal region candidate gene 11 | | | | |
| | | protein isoform 1 [Homo sapiens] | | | | |
| 434 | 98986453 | myosin-3 [Homo sapiens] | 77 | 586 | 560 | 136 |
| 435 | 54112429 | dedicator of cytokinesis protein 7 | 606 | 222 | 561 | 136 |
| | | [Homo sapiens] | | | | |
| 436 | 119703755 | laminin subunit beta-2 precursor | 704 | 206 | 564 | 136 |
| | | [Homo sapiens] | | | | |
| 437 | 148839466 | kalirin isoform 1 [Homo sapiens] | 254 | 320 | 566 | 136 |
| 438 | 115583670 | T-lymphoma invasion and metastasis- | 450 | 248 | 568 | 136 |
| | | inducing protein 1 [Homo sapiens] | | | | |
| 439 | 110611903 | myosin-4 [Homo sapiens] | 28 | 1297 | 570 | 135 |
| 440 | 217330594 | tubulin polyglutamylase TTLL4 [Homo sapiens] | 544 | 232 | 572 | 135 |
| 441 | 21361831 | partitioning defective 3 homolog | 730 | 202 | 576 | 135 |
| | | isoform 1 [Homo sapiens] | | | | |
| 442 | 38202209 | methyl-CpG-binding domain protein 5 | 703 | 206 | 580 | 135 |
| | | [Homo sapiens] | | | | |
| 443 | 110347463 | transcription factor HIVEP2 [Homo sapiens] | 546 | 232 | 584 | 135 |
| 444 | 111118970 | collagen alpha-2(XI) chain isoform 1 | 652 | 213 | 589 | 134 |
| | | preproprotein [Homo sapiens] | | | | |
| 445 | 190194412 | thyroid receptor-interacting protein 11 | 655 | 213 | 591 | 134 |
| | | [Homo sapiens] | | | | |
| 446 | 116006951 | polycystic kidney disease protein 1-like | 590 | 225 | 595 | 134 |
| | | 2 isoform a precursor [Homo sapiens] | | | | |
| 447 | 224451128 | protein eyes shut homolog isoform 1 | 456 | 247 | 597 | 134 |
| | | [Homo sapiens] | | | | |
| 448 | 115527062 | collagen alpha-2(VI) chain isoform 2C2 | 621 | 219 | 600 | 133 |
| | | precursor [Homo sapiens] | | | | |
| 449 | 50959205 | adenylate cyclase type 9 [Homo sapiens] | 578 | 226 | 602 | 133 |
| 450 | 21361458 | rho guanine nucleotide exchange factor | 333 | 280 | 607 | 133 |
| | | 17 [Homo sapiens] | | | | |
| 451 | 40254442 | plexin-B1 precursor [Homo sapiens] | 699 | 207 | 615 | 132 |
| 452 | 222352127 | protein sidekick-2 precursor [Homo sapiens] | 377 | 266 | 618 | 132 |
| 453 | 71565160 | structural maintenance of chromosomes | 672 | 210 | 619 | 132 |
| | | protein 1B [Homo sapiens] | | | | |
| 454 | 331284125 | E1A-binding protein p400 [Homo sapiens] | 521 | 234 | 622 | 132 |
| 455 | 134133288 | zinc finger protein 407 isoform 1 | 600 | 223 | 626 | 131 |
| | | [Homo sapiens] | | | | |
| 456 | 148806908 | fibronectin type III domain-containing | 537 | 232 | 629 | 131 |
| | | protein 1 precursor [Homo sapiens] | | | | |
| 457 | 153945790 | myosin-8 [Homo sapiens] | 34 | 1053 | 631 | 131 |
| 458 | 170016061 | spectrin beta chain brain 4 [Homo sapiens] | 152 | 416 | 633 | 131 |
| 459 | 19923084 | polycystic kidney disease protein 1-like | 385 | 264 | 640 | 130 |
| | | 1 [Homo sapiens] | | | | |
| 460 | 51339291 | sterile alpha motif domain-containing | 586 | 225 | 644 | 130 |
| | | protein 9-like [Homo sapiens] | | | | |
| 461 | 93102424 | protein FAM179B [Homo sapiens] | 525 | 234 | 652 | 129 |
| 462 | 55743096 | collagen alpha-1(XIV) chain precursor | 473 | 244 | 657 | 129 |
| | | [Homo sapiens] | | | | |
| 463 | 283837842 | protein unc-13 homolog A [Homo sapiens] | 550 | 231 | 661 | 129 |
| 464 | 47078218 | ATP-binding cassette sub-family A | 498 | 239 | 666 | 129 |
| | | member 2 isoform b [Homo sapiens] | | | | |
| 465 | 51599156 | chromodomain-helicase-DNA-binding | 306 | 293 | 667 | 129 |
| | | protein 4 [Homo sapiens] | | | | |
| 466 | 310119144 | PREDICTED: rootletin [Homo sapiens] | 388 | 264 | 672 | 128 |
| 467 | 119943102 | CREB-binding protein isoform b | 454 | 247 | 683 | 128 |
| | | [Homo sapiens] | | | | |
| 468 | 332801082 | citron Rho-interacting kinase isoform 1 | 366 | 269 | 685 | 127 |
| | | [Homo sapiens] | | | | |
| 469 | 93277088 | mediator of RNA polymerase II transcription | 738 | 201 | 690 | 127 |
| | | subunit 12-like protein [Homo sapiens] | | | | |
| 470 | 120587019 | zinc finger protein 318 [Homo sapiens] | 427 | 254 | 693 | 127 |
| 471 | 156139122 | methylcytosine dioxygenase TET1 | 303 | 296 | 697 | 127 |
| | | [Homo sapiens] | | | | |
| 472 | 150417986 | brefeldin A-inhibited guanine nucleotide- | 467 | 245 | 698 | 126 |
| | | exchange protein 2 [Homo sapiens] | | | | |
| 473 | 46358428 | intraflagellar transport protein 172 | 556 | 230 | 700 | 126 |
| | | homolog [Homo sapiens] | | | | |
| 474 | 100913220 | collagen alpha-1(XVI) chain precursor | 411 | 258 | 705 | 126 |
| | | [Homo sapiens] | | | | |
| 475 | 5902122 | spectrin beta chain brain 2 [Homo sapiens] | 480 | 243 | 708 | 126 |
| 476 | 149274646 | uncharacterized protein KIAA1614 | 620 | 219 | 711 | 126 |
| | | [Homo sapiens] | | | | |
| 477 | 47578105 | nipped-B-like protein isoform A [Homo sapiens] | 232 | 332 | 712 | 125 |
| 478 | 19923191 | 80 kDa MCM3-associated protein [Homo sapiens] | 459 | 247 | 713 | 125 |
| 21 | 4557871 | serotransferrin precursor [Homo sapiens] | 64 | 731 | 717 | 125 |
| 480 | 90991702 | leucine-rich repeat serine/threonine- | 503 | 238 | 726 | 124 |
| | | protein kinase 1 [Homo sapiens] | | | | |
| 481 | 122937400 | teneurin-3 [Homo sapiens] | 418 | 256 | 728 | 124 |
| 482 | 6715600 | Golgin subfamily A member 4 isoform 2 | 374 | 266 | 735 | 123 |
| | | [Homo sapiens] | | | | |
| 483 | 92859678 | snRNA-activating protein complex | 501 | 238 | 736 | 123 |
| | | subunit 4 [Homo sapiens] | | | | |
| 484 | 333440449 | CLIP-associating protein 2 isoform 1 | 526 | 234 | 743 | 123 |
| | | [Homo sapiens] | | | | |
| 485 | 120953251 | neuron navigator 3 [Homo sapiens] | 571 | 227 | 748 | 123 |
| 486 | 157952215 | receptor- type tyrosine-protein | 422 | 256 | 749 | 123 |
| | | phosphatase beta isoform a [Homo sapiens] | | | | |
| 487 | 160948599 | integrator complex subunit 1 [Homo sapiens] | 700 | 207 | 754 | 122 |
| 488 | 89142730 | collagen alpha-3(IV) chain precursor | 596 | 224 | 756 | 122 |
| | | [Homo sapiens] | | | | |
| 489 | 18105007 | CAD protein [Homo sapiens] | 684 | 209 | 760 | 122 |
| 490 | 44771211 | mediator of RNA polymerase II | 697 | 207 | 761 | 122 |
| | | transcription subunit 13-like [Homo sapiens] | | | | |
| 491 | 110347427 | ubiquitin carboxyl-terminal hydrolase 34 | 169 | 390 | 765 | 121 |
| | | [Homo sapiens] | | | | |
| 492 | 21536376 | ATP-binding cassette sub-family A | 694 | 207 | 766 | 121 |
| | | member 1 [Homo sapiens] | | | | |
| 493 | 224451124 | neurobeachin-like protein 1 [Homo sapiens] | 337 | 280 | 768 | 121 |
| 494 | 74048554 | protein CASC5 isoform 2 [Homo sapiens] | 376 | 266 | 775 | 120 |
| 495 | 21361116 | versican core protein isoform 1 | 455 | 247 | 779 | 120 |
| | | precursor [Homo sapiens] | | | | |
| 496 | 112382257 | inaD-like protein [Homo sapiens] | 718 | 204 | 780 | 120 |
| 497 | 40255272 | xin actin-binding repeat-containing | 205 | 358 | 781 | 120 |
| | | protein 1 isoform 1 [Homo sapiens] | | | | |
| 498 | 348041302 | phosphatidylinositol 4-kinase alpha | 617 | 220 | 782 | 120 |
| | | isoform 1 [Homo sapiens] | | | | |
| 499 | 231573214 | E3 ubiquitin-protein ligase listerin | 512 | 236 | 787 | 120 |
| | | [Homo sapiens] | | | | |
| 500 | 4507157 | sortilin-related receptor preproprotein | 675 | 209 | 790 | 119 |
| | | [Homo sapiens] | | | | |
| 501 | 150378463 | histone acetyltransferase KAT6A | 607 | 222 | 792 | 119 |
| | | [Homo sapiens] | | | | |
| 502 | 6912288 | CASP8-associated protein 2 [Homo sapiens] | 592 | 224 | 796 | 119 |
| 503 | 50843820 | sickle tail protein homolog isoform 1 | 616 | 220 | 800 | 119 |
| | | [Homo sapiens] | | | | |
| 504 | 33946282 | protein virilizer homolog isoform 1 | 594 | 224 | 801 | 119 |
| | | [Homo sapiens] | | | | |
| 505 | 118600961 | ral GTPase-activating protein subunit | 669 | 211 | 802 | 119 |
| | | alpha-2 [Homo sapiens] | | | | |
| 506 | 154813199 | poly [ADP-ribose] polymerase 14 [Homo sapiens] | 384 | 264 | 805 | 119 |
| 507 | 4757960 | cadherin-1 preproprotein [Homo sapiens] | 129 | 467 | 811 | 118 |
| 508 | 11968023 | zinc finger protein 106 homolog [Homo sapiens] | 557 | 230 | 818 | 118 |
| 509 | 310110100 | PREDICTED: mucin-5AC [Homo sapiens] | 200 | 363 | 829 | 117 |
| 510 | 21735548 | centrosome-associated protein CEP250 | 320 | 285 | 831 | 117 |
| | | [Homo sapiens] | | | | |
| 511 | 239582741 | FERM and PDZ domain-containing | 653 | 213 | 837 | 117 |
| | | protein 1 [Homo sapiens] | | | | |
| 512 | 197245440 | uncharacterized protein KIAA1107 | 533 | 233 | 839 | 116 |
| | | [Homo sapiens] | | | | |
| 513 | 116268127 | protein very KIND isoform a [Homo sapiens] | 476 | 243 | 844 | 116 |
| 514 | 41872631 | fatty acid synthase [Homo sapiens] | 585 | 225 | 848 | 116 |
| 515 | 124430752 | kinesin-like protein KIF26B [Homo sapiens] | 708 | 205 | 851 | 115 |
| 516 | 154354979 | unconventionnal myosin-X [Homo sapiens] | 589 | 225 | 852 | 115 |
| 517 | 115496169 | myosin-7 [Homo sapiens] | 49 | 852 | 861 | 115 |
| 518 | 148806881 | uncharacterized protein KIAA1462 | 608 | 222 | 862 | 115 |
| | | [Homo sapiens] | | | | |
| 519 | 164607133 | fer-1-like protein 5 [Homo sapiens] | 663 | 212 | 865 | 115 |
| 520 | 32313593 | olfactomedin-4 precursor [Homo sapiens] | 67 | 705 | 866 | 115 |
| 521 | 222537743 | phosphotidylinositol phosphatase | 723 | 202 | 873 | 114 |
| | | PTPRQ precursor [Homo sapiens] | | | | |
| 522 | 341915841 | PREDICTED: hypothetical protein | 597 | 224 | 875 | 114 |
| | | LOC100129543 [Homo sapiens] | | | | |
| 523 | 149944526 | putative Polycomb group protein | 727 | 202 | 876 | 114 |
| | | ASXL3 [Homo sapiens] | | | | |
| 524 | 19923790 | rab3 GTPase-activating protein non- | 646 | 214 | 880 | 114 |
| | | catalytic subunit [Homo sapiens] | | | | |
| 525 | 41393547 | neuroblastoma-amplified sequence | 471 | 244 | 884 | 114 |
| | | [Homo sapiens] | | | | |
| 526 | 178557739 | complement C4-B preproprotein [Homo sapiens] | 720 | 203 | 888 | 114 |
| 527 | 183396787 | BCL-6 corepressor isoform c [Homo sapiens] | 540 | 232 | 890 | 113 |
| 528 | 223468663 | aldo-keto reductase family 1 member | 70 | 667 | 895 | 113 |
| | | B10 [Homo sapiens] | | | | |
| 529 | 16357503 | collagen alpha-6(IV) chain isoform B | 291 | 303 | 897 | 113 |
| | | precursor [Homo sapiens] | | | | |
| 530 | 33620745 | pre-mRNA cleavage complex 2 protein | 664 | 212 | 908 | 113 |
| | | Pcf11 [Homo sapiens] | | | | |
| 531 | 134276943 | separin [Homo sapiens] | 555 | 231 | 909 | 113 |
| 532 | 194328738 | uncharacterized protein KIAA0556 | 440 | 250 | 911 | 113 |
| | | [Homo sapiens] | | | | |
| 533 | 222537754 | uncharacterized protein C3orf77 [Homo sapiens] | 472 | 244 | 921 | 112 |
| 534 | 56711286 | uncharacterized protein KIAA2022 | 721 | 203 | 935 | 111 |
| | | [Homo sapiens] | | | | |
| 535 | 54607120 | lactotransferrin isoform 1 precursor | 42 | 914 | 936 | 111 |
| | | [Homo sapiens] | | | | |
| 536 | 256773222 | uncharacterized protein C12orf35 | 516 | 235 | 940 | 111 |
| | | [Homo sapiens] | | | | |
| 537 | 31317272 | WD repeat and FYVE domain- | 266 | 314 | 944 | 111 |
| | | containing protein 3 [Homo sapiens] | | | | |
| 538 | 89111135 | multidrug resistance-associated protein | 741 | 201 | 947 | 111 |
| | | 9 [Homo sapiens] | | | | |
| 539 | 102468717 | mediator of RNA polymerase II | 603 | 222 | 959 | 110 |
| | | transcription subunit 13 [Homo sapiens] | | | | |
| 540 | 257196142 | piezo-type mechanosensitive ion | 622 | 219 | 974 | 110 |
| | | channel component 1 [Homo sapiens] | | | | |
| 541 | 38372909 | lysine-specific demethylase 3B [Homo sapiens] | 661 | 212 | 982 | 110 |
| 542 | 59891448 | rapamycin-insensitive companion of | 717 | 204 | 986 | 109 |
| | | mTOR [Homo sapiens] | | | | |
| 543 | 153946395 | tenascin precursor [Homo sapiens] | 509 | 237 | 1003 | 108 |
| 544 | 149944548 | neurobeachin-like protein 2 [Homo sapiens] | 674 | 210 | 1007 | 108 |
| 545 | 21536371 | telomerase protein component 1 [Homo sapiens] | 485 | 242 | 1016 | 108 |
| 47 | 98986445 | carcinoembryonic antigen-related cell adhesion | 36 | 996 | 1020 | 108 |
| | | molecule 5 preproprotein [Homo sapiens] | | | | |
| 546 | 150417984 | ATP-binding cassette sub-family A | 554 | 231 | 1022 | 108 |
| | | member 7 [Homo sapiens] | | | | |
| 547 | 10835063 | nucleophosmin isoform 1 [Homo sapiens] | 289 | 304 | 1036 | 106 |
| 548 | 237858799 | adenylate kinase domain-containing | 508 | 237 | 1038 | 106 |
| | | protein 1 isoform 1 [Homo sapiens] | | | | |
| 549 | 291219891 | PH domain leucine-rich repeat-containing | 559 | 229 | 1039 | 106 |
| | | protein phosphatase 1 [Homo sapiens] | | | | |
| 550 | 115334682 | SRC kinase signaling inhibitor 1 | 359 | 270 | 1043 | 106 |
| | | [Homo sapiens] | | | | |
| 551 | 162287219 | protein prune homolog 2 [Homo sapiens] | 487 | 242 | 1044 | 106 |
| 552 | 70980549 | protein RRP5 homolog [Homo sapiens] | 742 | 200 | 1045 | 106 |
| 553 | 33946327 | nuclear pore complex protein Nup214 | 618 | 220 | 1046 | 106 |
| | | [Homo sapiens] | | | | |
| 554 | 302565871 | uncharacterized protein C9orf174 | 698 | 207 | 1055 | 106 |
| | | [Homo sapiens] | | | | |
| 555 | 167857790 | alpha-1-acid glycoprotein 1 precursor | 204 | 358 | 1063 | 106 |
| | | [Homo sapiens] | | | | |
| 556 | 38348729 | uncharacterized protein C9orf93 [Homo sapiens] | 580 | 226 | 1076 | 105 |
| 557 | 50658063 | structural maintenance of chromosomes | 532 | 233 | 1083 | 105 |
| | | protein 4 [Homo sapiens] | | | | |
| 558 | 139394648 | DNA polymerase theta [Homo sapiens] | 436 | 250 | 1086 | 105 |
| 559 | 218083800 | rho GTPase-activating protein 32 | 644 | 215 | 1106 | 104 |
| | | isoform 1 [Homo sapiens] | | | | |
| 560 | 7706457 | A-kinase anchor protein 11 [Homo sapiens] | 598 | 223 | 1110 | 104 |
| 561 | 19923723 | ribosomal protein S6 kinase delta-1 | 722 | 203 | 1116 | 103 |
| | | isoform a [Homo sapiens] | | | | |
| 562 | 4502523 | voltage-dependent N-type calcium channel | 601 | 223 | 1122 | 103 |
| | | subunit alpha-1B isoform 1 [Homo sapiens] | | | | |
| 563 | 30089940 | Golgin subfamily A member 3 isoform 1 | 619 | 220 | 1130 | 103 |
| | | [Homo sapiens] | | | | |
| 564 | 122937345 | myosin-Vb [Homo sapiens] | 733 | 201 | 1132 | 103 |
| 565 | 45387958 | protein phosphatase 1 regulatory subunit | 504 | 238 | 1146 | 102 |
| | | 26 [Homo sapiens] | | | | |
| 566 | 27436873 | E3 ubiquitin-protein ligase SHPRH | 448 | 248 | 1152 | 102 |
| | | isoform b [Homo sapiens] | | | | |
| 567 | 341914961 | PREDICTED: FERM and PDZ domain- | 479 | 243 | 1159 | 102 |
| | | containing protein 3 [Homo sapiens] | | | | |
| 568 | 299829223 | coiled-coil domain-containing protein | 751 | 200 | 1167 | 101 |
| | | 141 [Homo sapiens] | | | | |
| 569 | 7662126 | signal-induced proliferation-associated | 650 | 213 | 1188 | 100 |
| | | 1-like protein 1 [Homo sapiens] | | | | |
| 570 | 150378549 | EH domain-binding protein 1-like | 584 | 225 | 1193 | 100 |
| | | protein 1 [Homo sapiens] | | | | |
| 571 | 168823435 | calpain-7-like protein [Homo sapiens] | 493 | 240 | 1212 | 100 |
| 572 | 32455273 | serine/threonine-protein kinase WNK2 | 659 | 213 | 1216 | 99 |
| | | [Homo sapiens] | | | | |
| 573 | 153945715 | myosin-Vc [Homo sapiens] | 491 | 241 | 1227 | 99 |
| 574 | 33620775 | kinectin isoform a [Homo sapiens] | 535 | 232 | 1229 | 99 |
| 575 | 341915544 | PREDICTED: LOW QUALITY | 151 | 418 | 1232 | 99 |
| | | PROTEIN: mucin-5AC [Homo sapiens] | | | | |
| 30 | 4557485 | ceruloplasmin precursor [Homo sapiens] | 338 | 279 | 1234 | 99 |
| 576 | 54792138 | probable helicase with zinc finger | 511 | 237 | 1237 | 99 |
| | | domain [Homo sapiens] | | | | |
| 577 | 63252863 | structure-specific endonuclease subunit | 660 | 213 | 1241 | 99 |
| | | SLX4 [Homo sapiens] | | | | |
| 578 | 150036262 | calcium-activated chloride channel | 252 | 321 | 1247 | 99 |
| | | regulator 4 precursor [Homo sapiens] | | | | |
| 579 | 38348727 | thyroid adenoma-associated protein | 435 | 251 | 1256 | 98 |
| | | [Homo sapiens] | | | | |
| 580 | 218505835 | membrane-associated guanylate kinase | 576 | 227 | 1264 | 98 |
| | | WW and PDZ domain-containing | | | | |
| | | protein 3 isoform 1 [Homo sapiens] | | | | |
| 581 | 178056552 | condensin complex subunit 1 [Homo sapiens] | 518 | 235 | 1286 | 97 |
| 582 | 44889475 | DENN domain-containing protein 5A | 740 | 201 | 1299 | 96 |
| | | isoform 1 [Homo sapiens] | | | | |
| 583 | 282721063 | uncharacterized protein C1orf173 | 549 | 231 | 1317 | 96 |
| | | [Homo sapiens] | | | | |
| 584 | 122891862 | DENN domain-containing protein 5B | 705 | 206 | 1335 | 95 |
| | | [Homo sapiens] | | | | |
| 585 | 112382250 | spectrin beta chain brain 1 isoform 1 | 258 | 317 | 1352 | 94 |
| | | [Homo sapiens] | | | | |
| 586 | 156119615 | myosin-IXa [Homo sapiens] | 505 | 238 | 1358 | 94 |
| 587 | 221139764 | PHD and RING finger domain- | 494 | 240 | 1367 | 94 |
| | | containing protein 1 [Homo sapiens] | | | | |
| 588 | 242246985 | clathrin heavy chain 2 isoform 1 | 654 | 213 | 1385 | 93 |
| | | [Homo sapiens] | | | | |
| 589 | 4502271 | sodium/potassium-transporting ATPase | 734 | 201 | 1413 | 92 |
| | | subunit alpha-2 proprotein [Homo sapiens] | | | | |
| 590 | 155030216 | sister chromatid cohesion protein PDS5 | 604 | 222 | 1422 | 92 |
| | | homolog A isoform 1 [Homo sapiens] | | | | |
| 591 | 47419930 | chondroitin sulfate proteoglycan 4 | 378 | 266 | 1428 | 92 |
| | | precursor [Homo sapiens] | | | | |
| 592 | 4759146 | slit homolog 2 protein precursor | 657 | 213 | 1442 | 91 |
| | | [Homo sapiens] | | | | |
| 593 | 18079216 | caskin-1 [Homo sapiens] | 562 | 228 | 1444 | 91 |
| 594 | 188528675 | slit homolog 1 protein precursor | 614 | 220 | 1492 | 90 |
| | | [Homo sapiens] | | | | |
| 595 | 281485608 | trefoil factor 3 precursor [Homo sapiens] | 678 | 209 | 1501 | 89 |
| 596 | 105990535 | coagulation factor V precursor [Homo sapiens] | 679 | 209 | 1504 | 89 |
| 597 | 57863271 | uncharacterized protein KIAA0564 | 628 | 218 | 1514 | 89 |
| | | isoform a precursor [Homo sapiens] | | | | |
| 598 | 255759952 | WD repeat-containing protein 81 | 695 | 207 | 1532 | 88 |
| | | isoform 1 [Homo sapiens] | | | | |
| 599 | 171906559 | peripheral-type benzodiazepine receptor- | 452 | 248 | 1533 | 88 |
| | | associated protein 1 isoform a [Homo sapiens] | | | | |
| 600 | 115529484 | CD 109 antigen isoform 1 precursor | 714 | 204 | 1543 | 88 |
| | | [Homo sapiens] | | | | |
| 601 | 54607035 | integrin beta-4 isoform 1 precursor | 391 | 263 | 1544 | 88 |
| | | [Homo sapiens] | | | | |
| 602 | 157426864 | zinc finger FYVE domain-containing | 634 | 217 | 1554 | 88 |
| | | protein 16 [Homo sapiens] | | | | |
| 603 | 11321571 | slit homolog 3 protein precursor | 645 | 214 | 1556 | 87 |
| | | [Homo sapiens] | | | | |
| 604 | 94400919 | WD repeat-containing protein 90 [Homo sapiens] | 520 | 234 | 1567 | 87 |
| 605 | 207028821 | RNA-binding protein 44 [Homo sapiens] | 588 | 225 | 1580 | 86 |
| 606 | 207113160 | treacle protein isoform d [Homo sapiens] | 574 | 227 | 1599 | 86 |
| 607 | 221219000 | inactive phospholipase C-like protein 2 | 706 | 206 | 1645 | 84 |
| | | isoform 1 [Homo sapiens] | | | | |
| 608 | 256600196 | rap guanine nucleotide exchange factor | 682 | 209 | 1657 | 84 |
| | | 6 isoform 1 [Homo sapiens] | | | | |
| 609 | 4557565 | DNA excision repair protein ERCC-6 | 536 | 232 | 1679 | 83 |
| | | [Homo sapiens] | | | | |
| 610 | 308736994 | NACHT and WD repeat domain- | 496 | 239 | 1703 | 83 |
| | | containing protein 1 [Homo sapiens] | | | | |
| 611 | 303304991 | centrosomal protein of 152 kDa isoform | 361 | 269 | 1706 | 83 |
| | | 1 [Homo sapiens] | | | | |
| 612 | 10835109 | myotubularin-related protein 3 isoform c | 743 | 200 | 1716 | 83 |
| | | [Homo sapiens] | | | | |
| 613 | 145701025 | multiple epidermal growth factor-like | 432 | 251 | 1735 | 82 |
| | | domains protein 8 precursor [Homo sapiens] | | | | |
| 614 | 160420295 | centrosomal protein KIAA1731 [Homo sapiens] | 499 | 239 | 1798 | 80 |
| 615 | 28626521 | NFX1-type zinc finger-containing | 517 | 235 | 1816 | 80 |
| | | protein 1 [Homo sapiens] | | | | |
| 616 | 31742492 | NEDD4-binding protein 2 [Homo sapiens] | 713 | 205 | 1882 | 78 |
| 617 | 4758190 | dipeptidase 1 precursor [Homo sapiens] | 162 | 395 | 1883 | 78 |
| 618 | 24308089 | chromodomain-helicase-DNA-binding | 564 | 228 | 1888 | 77 |
| | | protein 5 [Homo sapiens] | | | | |
| 619 | 222136585 | protein timeless homolog [Homo sapiens] | 572 | 227 | 1980 | 75 |
| 620 | 171846278 | leucine-rich repeat serine/threonine- | 514 | 235 | 1983 | 75 |
| | | protein kinase 2 [Homo sapiens] | | | | |
| 621 | 21361241 | ephrin type-A receptor 3 isoform a | 528 | 234 | 2031 | 74 |
| | | precursor [Homo sapiens] | | | | |
| 622 | 164565408 | pleckstrin homology domain-containing | 748 | 200 | 2072 | 73 |
| | | family G member 2 [Homo sapiens] | | | | |
| 623 | 4505621 | phosphatidylethanolamine-binding | 233 | 332 | 2086 | 73 |
| | | protein 1 preproprotein [Homo sapiens] | | | | |
| 624 | 46049114 | kinesin-like protein KIF20B [Homo sapiens] | 270 | 312 | 2117 | 72 |
| 625 | 67782362 | ATP-dependent RNA helicase DHX29 | 510 | 237 | 2156 | 71 |
| | | [Homo sapiens] | | | | |
| 626 | 31657140 | insulin receptor-related protein | 656 | 213 | 2247 | 69 |
| | | precursor [Homo sapiens] | | | | |
| 62 | 93141226 | xaa-Pro aminopeptidase 2 precursor | 147 | 426 | 2293 | 68 |
| | | [Homo sapiens] | | | | |
| 627 | 350529351 | protein NLRC5 [Homo sapiens] | 477 | 243 | 2421 | 65 |
| 628 | 163792198 | latrophilin-3 precursor [Homo sapiens] | 729 | 202 | 2431 | 65 |
| 629 | 145046269 | rotatin [Homo sapiens] | 445 | 249 | 2476 | 64 |
| 630 | 32189398 | gastric intrinsic factor precursor | 297 | 301 | 2510 | 64 |
| | | [Homo sapiens] | | | | |
| 631 | 134133226 | POTE ankyrin domain family member E | 611 | 221 | 2624 | 61 |
| | | [Homo sapiens] | | | | |
| 632 | 115527082 | myosin-1 [Homo sapiens] | 19 | 1529 | 0 | 0 |
| 633 | 153791586 | myosin-2 [Homo sapiens] | 24 | 1461 | 0 | 0 |
| 15 | 118498350 | chymotrypsinogen B2 precursor | 25 | 1445 | 0 | 0 |
| | | [Homo sapiens] | | | | |
| 22 | 115298678 | complement C3 precursor [Homo sapiens] | 27 | 1360 | 0 | 0 |
| 634 | 125819 | RecName: Full = Ig kappa chain V-III | 45 | 898 | 0 | 0 |
| | | region HIC; Flags: Precursor | | | | |
| 635 | 4557894 | lysozyme C precursor [Homo sapiens] | 46 | 884 | 0 | 0 |
| 636 | 125801 | RecName: Full = Ig kappa chain V-III | 53 | 812 | 0 | 0 |
| | | region Ti | | | | |
| 637 | 125797 | RecName: Full = Ig kappa chain V-III | 54 | 789 | 0 | 0 |
| | | region SIE | | | | |
| 638 | 294956573 | RecName: Full = Ig lambda-6 chain C | 57 | 763 | 0 | 0 |
| | | region | | | | |
| 54 | 341913702 | PREDICTED: deleted in malignant brain tumors | 61 | 744 | 0 | 0 |
| | | 1 protein isoform 2 [Homo sapiens] | | | | |
| 639 | 4505605 | regenerating islet-derived protein | 62 | 743 | 0 | 0 |
| | | 3-alpha precursor [Homo sapiens] | | | | |
| 640 | 294956599 | RecName: Full = Ig lambda-7 chain C | 63 | 735 | 0 | 0 |
| | | region | | | | |
| 641 | 148539842 | deleted in malignant brain tumors 1 | 66 | 717 | 0 | 0 |
| | | protein isoform b precursor [Homo sapiens] | | | | |
| 28 | 4826762 | haptoglobin isoform 1 preproprotein | 68 | 692 | 0 | 0 |
| | | [Homo sapiens] | | | | |
| 642 | 123843 | RecName: Full = Ig heavy chain V-III | 76 | 591 | 0 | 0 |
| | | region VH26; Flags: Precursor | | | | |
| 643 | 4503571 | alpha-enolase isoform 1 [Homo sapiens] | 78 | 582 | 0 | 0 |
| 644 | 40354205 | fructose-bisphosphate aldolase B | 79 | 580 | 0 | 0 |
| | | [Homo sapiens] | | | | |
| 645 | 118918403 | nesprin-2 isoform 1 [Homo sapiens] | 81 | 567 | 0 | 0 |
| 646 | 113204615 | ryanodine receptor 1 isoform 1 | 84 | 564 | 0 | 0 |
| | | [Homo sapiens] | | | | |
| 647 | 125770 | RecName: Full = Ig kappa chain V-I region OU | 85 | 562 | 0 | 0 |
| 648 | 4557577 | fatty acid-binding protein liver | 88 | 560 | 0 | 0 |
| | | [Homo sapiens] | | | | |
| 649 | 125761 | RecName: Full = Ig kappa chain V-I region DEE | 92 | 549 | 0 | 0 |
| 650 | 23097308 | nesprin-1 isoform 2 [Homo sapiens] | 95 | 543 | 0 | 0 |
| 651 | 4504963 | lipocalin-1 isoform 1 precursor [Homo sapiens] | 96 | 543 | 0 | 0 |
| 652 | 58331253 | obscurin isoform a [Homo sapiens] | 97 | 542 | 0 | 0 |
| 653 | 126032350 | DNA-dependent protein kinase catalytic | 99 | 537 | 0 | 0 |
| | | subunit isoform 2 [Homo sapiens] | | | | |
| 654 | 125756 | RecName: Full = Ig kappa chain V-I region AG | 101 | 528 | 0 | 0 |
| 655 | 125774 | RecName: Full = Ig kappa chain V-I region WEA | 105 | 520 | 0 | 0 |
| 656 | 125758 | RecName: Full = Ig kappa chain V-I region AU | 106 | 517 | 0 | 0 |
| 657 | 125790 | RecName: Full = Ig kappa chain V-II | 108 | 511 | 0 | 0 |
| | | region GM607; Flags: Precursor | | | | |
| 658 | 125799 | RecName: Full = Ig kappa chain V-III | 110 | 504 | 0 | 0 |
| | | region NG9; Flags: Precursor | | | | |
| 659 | 1170720 | RecName: Full = Ig kappa chain V-I region WAT | 117 | 484 | 0 | 0 |
| 660 | 123845 | RecName: Full = Ig heavy chain V-III | 124 | 474 | 0 | 0 |
| | | region BRO | | | | |
| 661 | 125833 | RecName: Full = Ig kappa chain V-IV | 130 | 457 | 0 | 0 |
| | | region JI; Flags: Precursor | | | | |
| 662 | 257743025 | nebulin isoform 2 [Homo sapiens] | 132 | 454 | 0 | 0 |
| 663 | 123844 | RecName: Full = Ig heavy chain V-III | 134 | 453 | 0 | 0 |
| | | region TIL | | | | |
| 664 | 193806361 | RecName: Full = Ig gamma-3 chain C | 144 | 433 | 0 | 0 |
| | | region; AltName: Full = HDC; AltName: | | | | |
| | | Full = Heavy chain disease protein | | | | |
| 665 | 54607141 | vacuolar protein sorting-associated | 146 | 426 | 0 | 0 |
| | | protein 13D isoform 2 [Homo sapiens] | | | | |
| 666 | 223633991 | pantetheinase precursor [Homo sapiens] | 150 | 419 | 0 | 0 |
| 667 | 341914926 | PREDICTED: ig heavy chain V-III | 154 | 413 | 0 | 0 |
| | | region VH26-like [Homo sapiens] | | | | |
| 668 | 218512079 | RecName: Full = Ig gamma-2 chain C region | 158 | 402 | 0 | 0 |
| 669 | 125779 | RecName: Full = Ig kappa chain V-I | 161 | 397 | 0 | 0 |
| | | region Walker; Flags: Precursor | | | | |
| 670 | 125766 | RecName: Full = Ig kappa chain V-I | 167 | 391 | 0 | 0 |
| | | region HK102; Flags: Precursor | | | | |
| 671 | 125763 | RecName: Full = Ig kappa chain V-I region Gal | 171 | 388 | 0 | 0 |
| 672 | 341914862 | PREDICTED: hypothetical protein | 173 | 385 | 0 | 0 |
| | | LOC100291917 [Homo sapiens] | | | | |
| 673 | 125795 | RecName: Full = Ig kappa chain V-III | 175 | 381 | 0 | 0 |
| | | region B6 | | | | |
| 674 | 73858568 | plasma protease C1 inhibitor precursor | 178 | 377 | 0 | 0 |
| | | [Homo sapiens] | | | | |
| 675 | 341913664 | PREDICTED: hypothetical protein | 179 | 377 | 0 | 0 |
| | | LOC642424 [Homo sapiens] | | | | |
| 676 | 188595687 | filamin-C isoform b [Homo sapiens] | 180 | 376 | 0 | 0 |
| 677 | 341915168 | PREDICTED: ig kappa chain V-I region | 182 | 373 | 0 | 0 |
| | | Walker-like [Homo sapiens] | | | | |
| 678 | 256017159 | MAX gene-associated protein isoform 2 | 190 | 368 | 0 | 0 |
| | | [Homo sapiens] | | | | |
| 679 | 53759122 | adenomatous polyposis coli protein | 195 | 366 | 0 | 0 |
| | | isoform b [Homo sapiens] | | | | |
| 680 | 4502067 | protein AMBP preproprotein [Homo sapiens] | 202 | 361 | 0 | 0 |
| 681 | 47607492 | plectin isoform 1c [Homo sapiens] | 207 | 354 | 0 | 0 |
| 682 | 310114449 | PREDICTED: hypothetical protein | 210 | 351 | 0 | 0 |
| | | LOC131544 [Homo sapiens] | | | | |
| 683 | 341915514 | PREDICTED: ig kappa chain V-I region | 211 | 351 | 0 | 0 |
| | | Walker-like [Homo sapiens] | | | | |
| 684 | 125762 | RecName: Full = Ig kappa chain V-I region EU | 220 | 346 | 0 | 0 |
| 685 | 125811 | RecName: Full = Ig kappa chain V-III | 221 | 343 | 0 | 0 |
| | | region VG; Flags: Precursor | | | | |
| 686 | 312032409 | aminoacylase-1 isoform d [Homo sapiens] | 225 | 339 | 0 | 0 |
| 687 | 283806679 | cytoplasmic dynein 2 heavy chain 1 | 231 | 333 | 0 | 0 |
| | | isoform 1 [Homo sapiens] | | | | |
| 688 | 21735621 | malate dehydrogenase mitochondrial | 234 | 332 | 0 | 0 |
| | | precursor [Homo sapiens] | | | | |
| 689 | 115298657 | protein S100-A7 [Homo sapiens] | 245 | 323 | 0 | 0 |
| 690 | 27436940 | reelin isoform b precursor [Homo sapiens] | 251 | 321 | 0 | 0 |
| 691 | 51230412 | ral GTPase-activating protein subunit | 257 | 317 | 0 | 0 |
| | | alpha-1 isoform 2 [Homo sapiens] | | | | |
| 692 | 374532817 | Golgin subfamily B member 1 isoform 1 | 260 | 316 | 0 | 0 |
| | | [Homo sapiens] | | | | |
| 693 | 109826564 | neurofibromin isoform 1 [Homo sapiens] | 261 | 316 | 0 | 0 |
| 694 | 301897469 | beta-enolase isoform 1 [Homo sapiens] | 264 | 315 | 0 | 0 |
| 695 | 38683816 | ankyrin repeat domain-containing | 276 | 308 | 0 | 0 |
| | | protein 17 isoform b [Homo sapiens] | | | | |
| 696 | 16579888 | fructose-16-bisphosphatase 1 [Homo sapiens] | 284 | 306 | 0 | 0 |
| 697 | 126362967 | nck-associated protein 5 isoform 1 | 287 | 305 | 0 | 0 |
| | | [Homo sapiens] | | | | |
| 698 | 38045890 | CUB and sushi domain-containing | 301 | 299 | 0 | 0 |
| | | protein 3 isoform 2 [Homo sapiens] | | | | |
| 699 | 331284178 | nuclear receptor corepressor 2 isoform 1 | 309 | 292 | 0 | 0 |
| | | [Homo sapiens] | | | | |
| 700 | 151301154 | mucin-6 precursor [Homo sapiens] | 311 | 291 | 0 | 0 |
| 701 | 298919181 | nuclear receptor corepressor 1 isoform 3 | 321 | 285 | 0 | 0 |
| | | [Homo sapiens] | | | | |
| 702 | 27477095 | histone-lysine N-methyltransferase H3 | 331 | 281 | 0 | 0 |
| | | lysine-36 and H4 lysine-20 specific | | | | |
| | | isoform a [Homo sapiens] | | | | |
| 703 | 98985810 | collagen alpha-1(XI) chain isoform B | 334 | 280 | 0 | 0 |
| | | preproprotein [Homo sapiens] | | | | |
| 704 | 269954694 | inositol 1 4 5-trisphosphate receptor | 339 | 279 | 0 | 0 |
| | | type 1 isoform 3 [Homo sapiens] | | | | |
| 705 | 66346674 | vacuolar protein sorting-associated | 343 | 278 | 0 | 0 |
| | | protein 13A isoform A [Homo sapiens] | | | | |
| 706 | 125786 | RecName: Full = Ig kappa chain V-II region MIL | 349 | 274 | 0 | 0 |
| 707 | 38505274 | voltage-dependent T-type calcium channel | 355 | 272 | 0 | 0 |
| | | subunit alpha-1G isoform 7 [Homo sapiens] | | | | |
| 708 | 148536846 | voltage-dependent P/Q-type calcium channel | 358 | 271 | 0 | 0 |
| | | subunit alpha-1A isoform 2 [Homo sapiens] | | | | |
| 709 | 5032281 | dystrophin Dp427c isoform [Homo sapiens] | 379 | 266 | 0 | 0 |
| 710 | 122937195 | perilipin-4 [Homo sapiens] | 381 | 265 | 0 | 0 |
| 711 | 209969819 | protein PRR14L [Homo sapiens] | 383 | 264 | 0 | 0 |
| 712 | 341915607 | PREDICTED: hypothetical protein | 389 | 263 | 0 | 0 |
| | | LOC144535 [Homo sapiens] | | | | |
| 713 | 33356170 | myosin-IXb isoform 1 [Homo sapiens] | 390 | 263 | 0 | 0 |
| 714 | 59710093 | probable G-protein coupled receptor 112 | 392 | 263 | 0 | 0 |
| | | [Homo sapiens] | | | | |
| 715 | 341913933 | PREDICTED: hypothetical protein | 400 | 262 | 0 | 0 |
| | | LOC100653084 [Homo sapiens] | | | | |
| 716 | 341914924 | PREDICTED: ig heavy chain V-III | 405 | 260 | 0 | 0 |
| | | region VH26-like [Homo sapiens] | | | | |
| 717 | 116089331 | transcription factor HIVEP3 isoform a | 406 | 260 | 0 | 0 |
| | | [Homo sapiens] | | | | |
| 718 | 224586880 | ras-specific guanine nucleotide-releasing | 415 | 257 | 0 | 0 |
| | | factor 1 isoform 3 [Homo sapiens] | | | | |
| 719 | 113415686 | PREDICTED: hypothetical protein | 420 | 256 | 0 | 0 |
| | | LOC285556 [Homo sapiens] | | | | |
| 720 | 311771583 | LY75-CD302 fusion protein isoform 1 | 437 | 250 | 0 | 0 |
| | | precursor [Homo sapiens] | | | | |
| 721 | 214010175 | CLIP-associating protein 1 isoform 3 | 443 | 249 | 0 | 0 |
| | | [Homo sapiens] | | | | |
| 722 | 16933542 | fibronectin isoform 3 preproprotein | 446 | 249 | 0 | 0 |
| | | [Homo sapiens] | | | | |
| 723 | 31563537 | CLIP-associating protein 1 isoform 1 | 447 | 249 | 0 | 0 |
| | | [Homo sapiens] | | | | |
| 724 | 73695475 | HEAT repeat-containing protein 1 | 449 | 248 | 0 | 0 |
| | | [Homo sapiens] | | | | |
| 725 | 5803011 | gamma-enolase [Homo sapiens] | 451 | 248 | 0 | 0 |
| 726 | 296317312 | carcinoembryonic antigen-related cell | 460 | 247 | 0 | 0 |
| | | adhesion molecule 1 isoform 3 precursor | | | | |
| | | [Homo sapiens] | | | | |
| 727 | 117168250 | 1-phosphatidylinositol-4 5-bisphosphate | 463 | 246 | 0 | 0 |
| | | phosphodiesterase epsilon-1 isoform 1 | | | | |
| | | [Homo sapiens] | | | | |
| 728 | 363807222 | girdin isoform 3 [Homo sapiens] | 464 | 246 | 0 | 0 |
| 729 | 121114300 | carcinoembryonic antigen-related cell | 466 | 245 | 0 | 0 |
| | | adhesion molecule 3 precursor | | | | |
| | | [Homo sapiens] | | | | |
| 730 | 125809 | RecName: Full = Ig kappa chain V-III | 469 | 245 | 0 | 0 |
| | | region CLL; AltName: Full = Rheumatoid | | | | |
| | | factor; Flags: Precursor | | | | |
| 731 | 170650694 | arf-GAP with GTPase ANK repeat and | 474 | 243 | 0 | 0 |
| | | PH domain-containing protein 2 isoform | | | | |
| | | PIKE-L [Homo sapiens] | | | | |
| 732 | 116008192 | myosin light chain kinase smooth | 478 | 243 | 0 | 0 |
| | | muscle isoform 1 [Homo sapiens] | | | | |
| 733 | 33620769 | E3 ubiquitin-protein ligase RBBP6 | 481 | 243 | 0 | 0 |
| | | isoform 1 [Homo sapiens] | | | | |
| 734 | 4502895 | colipase isoform 1 preproprotein | 482 | 243 | 0 | 0 |
| | | [Homo sapiens] | | | | |
| 735 | 4505941 | DNA-directed RNA polymerase II | 484 | 242 | 0 | 0 |
| | | subunit RPB2 [Homo sapiens] | | | | |
| 736 | 154759259 | spectrin alpha chain brain isoform 2 | 488 | 242 | 0 | 0 |
| | | [Homo sapiens] | | | | |
| 737 | 208022632 | girdin isoform 1 [Homo sapiens] | 489 | 241 | 0 | 0 |
| 738 | 350276222 | neuron navigator 2 isoform 5 [Homo sapiens] | 490 | 241 | 0 | 0 |
| 739 | 15890086 | collagen alpha-5(IV) chain isoform 2 | 523 | 234 | 0 | 0 |
| | | precursor [Homo sapiens] | | | | |
| 740 | 333440451 | CLIP-associating protein 2 isoform 2 | 524 | 234 | 0 | 0 |
| | | [Homo sapiens] | | | | |
| 741 | 327365361 | HEAT repeat-containing protein 5A | 527 | 234 | 0 | 0 |
| | | [Homo sapiens] | | | | |
| 742 | 92091583 | myosin-11 isoform SM2B [Homo sapiens] | 529 | 234 | 0 | 0 |
| 743 | 215598574 | ankyrin-1 isoform 9 [Homo sapiens] | 534 | 233 | 0 | 0 |
| 744 | 20336209 | transcriptional regulator ATRX isoform | 539 | 232 | 0 | 0 |
| | | 1 [Homo sapiens] | | | | |
| 745 | 24308029 | dedicator of cytokinesis protein 9 | 541 | 232 | 0 | 0 |
| | | isoform a [Homo sapiens] | | | | |
| 746 | 123847 | RecName: Full = Ig heavy chain V-III | 545 | 232 | 0 | 0 |
| | | region CAM | | | | |
| 747 | 161169013 | neuron navigator 2 isoform 1 [Homo sapiens] | 552 | 231 | 0 | 0 |
| 748 | 4557365 | Bloom syndrome protein [Homo sapiens] | 553 | 231 | 0 | 0 |
| 749 | 46049105 | nebulin-related-anchoring protein | 561 | 228 | 0 | 0 |
| | | isoform S [Homo sapiens] | | | | |
| 750 | 4504349 | hemoglobin subunit beta [Homo sapiens] | 570 | 228 | 0 | 0 |
| 751 | 93204888 | spatacsin isoform 1 [Homo sapiens] | 573 | 227 | 0 | 0 |
| 752 | 123846 | RecName: Full = Ig heavy chain V-III | 575 | 227 | 0 | 0 |
| | | region BUT | | | | |
| 753 | 120953300 | leucine-rich repeat and IQ domain- | 577 | 227 | 0 | 0 |
| | | containing protein 1 [Homo sapiens] | | | | |
| 754 | 311771516 | myomegalin isoform 8 [Homo sapiens] | 579 | 226 | 0 | 0 |
| 755 | 114155142 | nucleoprotein TPR [Homo sapiens] | 582 | 226 | 0 | 0 |
| 756 | 71274186 | uncharacterized protein KIAA1755 | 583 | 225 | 0 | 0 |
| | | [Homo sapiens] | | | | |
| 757 | 70780355 | ankyrin-1 isoform 2 [Homo sapiens] | 591 | 225 | 0 | 0 |
| 758 | 4503689 | fibrinogen alpha chain isoform alpha-E | 593 | 224 | 0 | 0 |
| | | preproprotein [Homo sapiens] | | | | |
| 759 | 4506773 | protein S100-A9 [Homo sapiens] | 595 | 224 | 0 | 0 |
| 760 | 355390328 | kinesin-like protein KIF21B isoform 3 | 609 | 221 | 0 | 0 |
| | | [Homo sapiens] | | | | |
| 761 | 315709510 | protein dopey-1 isoform b [Homo sapiens] | 612 | 221 | 0 | 0 |
| 762 | 224831241 | myosin-14 isoform 3 [Homo sapiens] | 615 | 220 | 0 | 0 |
| 763 | 22094135 | histone-lysine N-methyltransferase H3 | 624 | 219 | 0 | 0 |
| | | lysine-79 specific [Homo sapiens] | | | | |
| 764 | 300797780 | serine/threonine-protein kinase WNK1 | 626 | 218 | 0 | 0 |
| | | isoform 3 [Homo sapiens] | | | | |
| 765 | 256818778 | protein unc-80 homolog isoform 2 | 633 | 217 | 0 | 0 |
| | | [Homo sapiens] | | | | |
| 766 | 125777 | RecName: Full = Ig kappa chain V-I region Ni | 639 | 216 | 0 | 0 |
| 767 | 21361861 | Fanconi anemia group D2 protein | 641 | 215 | 0 | 0 |
| | | isoform a [Homo sapiens] | | | | |
| 768 | 293597572 | transient receptor potential cation | 647 | 214 | 0 | 0 |
| | | channel subfamily M member 6 isoform | | | | |
| | | b [Homo sapiens] | | | | |
| 769 | 41393563 | kinesin-like protein KIF1B isoform b | 648 | 214 | 0 | 0 |
| | | [Homo sapiens] | | | | |
| 770 | 267844813 | neuron navigator 1 isoform 2 [Homo sapiens] | 649 | 213 | 0 | 0 |
| 771 | 269847874 | probable ATP-dependent RNA helicase | 662 | 212 | 0 | 0 |
| | | YTHDC2 [Homo sapiens] | | | | |
| 772 | 222352161 | probable phospholipid-transporting | 666 | 211 | 0 | 0 |
| | | ATPase VD [Homo sapiens] | | | | |
| 773 | 65287717 | eukaryotic translation initiation factor 2- | 667 | 211 | 0 | 0 |
| | | alpha kinase 4 [Homo sapiens] | | | | |
| 774 | 224586815 | Golgi apparatus protein 1 isoform 2 | 673 | 210 | 0 | 0 |
| | | precursor [Homo sapiens] | | | | |
| 775 | 94966754 | elongation factor Tu GTP-binding | 677 | 209 | 0 | 0 |
| | | domain-containing protein 1 isoform 1 | | | | |
| | | [Homo sapiens] | | | | |
| 776 | 115648142 | centrosomal protein of 164 kDa | 680 | 209 | 0 | 0 |
| | | [Homo sapiens] | | | | |
| 777 | 46852172 | kinesin-like protein KIF13B [Homo sapiens] | 681 | 209 | 0 | 0 |
| 778 | 19913410 | major vault protein [Homo sapiens] | 683 | 209 | 0 | 0 |
| 58 | 58331211 | chymotrypsin-like elastase family | 687 | 208 | 0 | 0 |
| | | member 2B preproprotein [Homo sapiens] | | | | |
| 779 | 38044112 | CAP-Gly domain-containing linker | 688 | 208 | 0 | 0 |
| | | protein 1 isoform b [Homo sapiens] | | | | |
| 780 | 40255013 | carcinoembryonic antigen-related cell | 689 | 208 | 0 | 0 |
| | | adhesion molecule 6 precursor | | | | |
| | | [Homo sapiens] | | | | |
| 781 | 4504919 | keratin type II cytoskeletal 8 isoform 2 | 691 | 208 | 0 | 0 |
| | | [Homo sapiens] | | | | |
| 782 | 194097325 | fatty acid-binding protein intestinal | 701 | 206 | 0 | 0 |
| | | [Homo sapiens] | | | | |
| 783 | 319803120 | testis-expressed protein 14 isoform c | 702 | 206 | 0 | 0 |
| | | [Homo sapiens] | | | | |
| 784 | 354721145 | transient receptor potential cation | 707 | 206 | 0 | 0 |
| | | channel subfamily M member 1 isoform | | | | |
| | | 1 [Homo sapiens] | | | | |
| 785 | 151301137 | AT-hook-containing transcription factor | 711 | 205 | 0 | 0 |
| | | [Homo sapiens] | | | | |
| 786 | 45827771 | enhancer of mRNA-decapping protein 4 | 712 | 205 | 0 | 0 |
| | | [Homo sapiens] | | | | |
| 787 | 208609951 | neurexin-1-beta isoform alpha2 | 716 | 204 | 0 | 0 |
| | | precursor [Homo sapiens] | | | | |
| 788 | 217416354 | A-kinase anchor protein SPHKAP | 719 | 203 | 0 | 0 |
| | | isoform 1 [Homo sapiens] | | | | |
| 789 | 30794372 | protein polybromo-1 isoform 1 [Homo sapiens] | 725 | 202 | 0 | 0 |
| 790 | 24307991 | cullin-9 [Homo sapiens] | 726 | 202 | 0 | 0 |
| 791 | 50345997 | histone acetyltransferase p300 [Homo sapiens] | 735 | 201 | 0 | 0 |
| 792 | 149773449 | zinc finger protein 862 [Homo sapiens] | 736 | 201 | 0 | 0 |
| 479 | 38327601 | regulator of G-protein signaling 12 | 737 | 201 | 0 | 0 |
| | | isoform 1 [Homo sapiens] | | | | |
| 43 | 42794779 | myosin-XVIIIa isoform b [Homo sapiens] | 745 | 200 | 0 | 0 |
| 67 | 157419122 | laminin subunit alpha-4 isoform 2 | 747 | 200 | 0 | 0 |
| | | precursor [Homo sapiens] | | | | |

[0188] The NCBI Accession Numbers for proteins defined by the NCBI protein database has been provided. The sequences of the proteins as reflected by the NCBI Accession Numbers listed throughout the present application are incorporated herein by reference. Where a protein is named in its preprotein or other non-mature form, the mature form of the protein is equally implied including such changes as removal of signal sequences and the addition of post-translational modifications. In all cases, the protein has been named by its gene derived sequence to provide consistency. In addition, isoforms of each of the proteins identified herein are similarly envisioned.

[0189] The above description discloses several methods and materials of the present invention. This invention is susceptible to modifications in the methods and materials, as well as alterations in the fabrication methods and equipment. Such modifications will become apparent to those skilled in the art from a consideration of this disclosure or practice of the invention disclosed herein. Consequently, it is not intended that this invention be limited to the specific embodiments disclosed herein, but that it cover all modifications and alternatives coming within the true scope and spirit of the invention.

The application's sequence listing, which the Patent Office published only in electronic form, follows.

SEQUENCE LISTING (793 sequences)

SEQ ID NO: 1 - protein, 465 aa, Homo sapiens
MLPLWTLSLLLGAVAGKEVCYERLGCFSDDSPWSGITERPLHILPWSPKDVNTRFLLYTNENPNNFQEVAADSSSISGSNFKTNRKTRFIIHGFIDKGEENWLANVCKNLFKVESVNCICVDWKGGSRTGYTQASQNIRIVGAEVAYFVEFLQSAFGYSPSNVHVIGHSLGAHAAGEAGRRTNGTIGRITGLDPAEPCFQGTPELVRLDPSDAKFVDVIHTDGAPIVPNLGFGMSQVVGHLDFFPNGGVEMPGCKKNILSQIVDIDGIWEGTRDFAACNHLRSYKYYTDSIVNPDGFAGFPCASYNVFTANKCFPCPSGGCPQMGHYADRYPGKTNDVGQKFYLDTGDASNFARWRYKVSVTLSGKKVTGHILVSLFGNKGNSKQYEIFKGTLKPDSTHSNEFDSDVDVGDLQMVKFIWYNNVINPTLPRVGASKIIVETNVGKQFNFCSPETVREEVLLTLTPC

SEQ ID NO: 2 - protein, 511 aa, Homo sapiens
MKFFLLLFTIGFCWAQYSPNTQQGRTSIVHLFEWRWVDIALECERYLAPKGFGGVQVSPPNENVAIYNPFRPWWERYQPVSYKLCTRSGNEDEFRNMVTRCNNVGVRIYVDAVINHMCGNAVSAGTSSTCGSYFNPGSRDFPAVPYSGWDFNDGKCKTGSGDIENYNDATQVRDCRLTGLLDLALEKDYVRSKIAEYMNHLIDIGVAGFRLDASKHMWPGDIKAILDKLHNLNSNWFPAGSKPFIYQEVIDLGGEPIKSSDYFGNGRVTEFKYGAKLGTVIRKWNGEKMSYLKNWGEGWGFVPSDRALVFVDNHDNQRGHGAGGASILTFWDARLYKMAVGFMLAHPYGFTRVMSSYRWPRQFQNGNDVNDWVGPPNNNGVIKEVTINPDTTCGNDWVCEHRWRQIRNMVIFRNVVDGQPFTNWYDNGSNQVAFGRGNRGFIVFNNDDWSFSLTLQTGLPAGTYCDVISGDKINGNCTGIKIYVSDDGKAHFSISNSAEDPFIAIHAESKL

SEQ ID NO: 3 - protein, 511 aa, Homo sapiens
MKFFLLLFTIGFCWAQYSPNTQQGRTSIVHLFEWRWVDIALECERYLAPKGFGGVQVSPPNENVAIHNPFRPWWERYQPVSYKLCTRSGNEDEFRNMVTRCNNVGVRIYVDAVINHMSGNAVSAGTSSTCGSYFNPGSRDFPAVPYSGWDFNDGKCKTGSGDIENYNDATQVRDCRLVGLLDLALEKDYVRSKIAEYMNHLIDIGVAGFRLDASKHMWPGDIKAILDKLHNLNSNWFPAGSKPFIYQEVIDLGGEPIKSSDYFGNGRVTEFKYGAKLGTVIRKWNGEKMSYLKNWGEGWGFMPSDRALVFVDNHDNQRGHGAGGASILTFWDARLYKMAVGFMLAHPYGFTRVMSSYRWPRQFQNGNDVNDWVGPPNNNGVIKEVTINPDTTCGNDWVCEHRWRQIRNMVNFRNVVDGQPFTNWYDNGSNQVAFGRGNRGFIVFNNDDWTFSLTLQTGLPAGTYCDVISGDKINGNCTGIKIYVSDDGKAHFSISNSAEDPFIAIHAESKL

SEQ ID NO: 4 - protein, 419 aa, Homo sapiens
MRGLLVLSVLLGAVFGKEDFVGHQVLRISVADEAQVQKVKELEDLEHLQLDFWRGPAHPGSPIDVRVPFPSIQAVKIFLESHGISYETMIEDVQSLLDEEQEQMFAFRSRARSTDTFNYATYHTLEEIYDFLDLLVAENPHLVSKIQIGNTYEGRPIYVLKFSTGGSKRPAIWIDTGIHSREWVTQASGVWFAKKITQDYGQDAAFTAILDTLDIFLEIVTNPDGFAFTHSTNRMWRKTRSHTAGSLCIGVDPNRNWDAGFGLSGASSNPCSETYHGKFANSEVEVKSIVDFVKDHGNIKAFISIHSYSQLLMYPYGYKTEPVPDQDELDQLSKAAVTALASLYGTKFNYGSIIKAIYQASGSTIDWTYSQGIKYSFTFELRDTGRYGFLLPASQIIPTAKETWLALLTIMEHTLNHPY

SEQ ID NO: 5 - protein, 511 aa, Homo sapiens
MKLFWLLFTIGFCWAQYSSNTQQGRTSIVHLFEWRWVDIALECERYLAPKGFGGVQVSPPNENVAIHNPFRPWWERYQPVSYKLCTRSGNEDEFRNMVTRCNNVGVRIYVDAVINHMCGNAVSAGTSSTCGSYFNPGSRDFPAVPYSGWDFNDGKCKTGSGDIENYNDATQVRDCRLSGLLDLALGKDYVRSKIAEYMNHLIDIGVAGFRIDASKHMWPGDIKAILDKLHNLNSNWFPEGSKPFIYQEVIDLGGEPIKSSDYFGNGRVTEFKYGAKLGTVIRKWNGEKMSYLKNWGEGWGFMPSDRALVFVDNHDNQRGHGAGGASILTFWDARLYKMAVGFMLAHPYGFTRVMSSYRWPRYFENGKDVNDWVGPPNDNGVTKEVTINPDTTCGNDWVCEHRWRQIRNMVNFRNVVDGQPFTNWYDNGSNQVAFGRGNRGFIVFNNDDWTFSLTLQTGLPAGTYCDVISGDKINGNCTGIKIYVSDDGKAHFSISNSAEDPFIAIHAESKL

SEQ ID NO: 6 - protein, 417 aa, Homo sapiens
MLALLVLVTVALASAHHGGEHFEGEKVFRVNVEDENHINIIRELASTTQIDFWKPDSVTQIKPHSTVDFRVKAEDTVTVENVLKQNELQYKVLISNLRNVVEAQFDSRVRATGHSYEKYNKWETIEAWTQQVATENPALISRSVIGTTFEGRAIYLLKVGKAGQNKPAIFMDCGFHAREWISPAFCQWFVREAVRTYGREIQVTELLDKLDFYVLPVLNIDGYIYTWTKSRFWRKTRSTHTGSSCIGTDPNRNFDAGWCEIGASRNPCDETYCGPAAESEKETKALADFIRNKLSSIKAYLTIHSYSQMMIYPYSYAYKLGENNAELNALAKATVKELASLHGTKYTYGPGATTIYPAAGGSDDWAYDQGIRYSFTFELRDTGRYGFLLPESQIRATCEETFLAIKYVASYVLEHLY

SEQ ID NO: 7 - protein, 419 aa, Homo sapiens
MAMRLILFFGALFGHIYCLETFVGDQVLEIVPSNEEQIKNLLQLEAQEHLQLDFWKSPTTPGETAHVRVPFVNVQAVKVFLESQGIAYSIMIEDVQVLLDKENEEMLFNRRRERSGNFNFGAYHTLEEISQEMDNLVAEHPGLVSKVNIGSSFENRPMNVLKFSTGGDKPAIWLDAGIHAREWVTQATALWTANKIVSDYGKDPSITSILDALDIFLLPVTNPDGYVFSQTKNRMWRKTRSKVSGSLCVGVDPNRNWDAGFGGPGASSNPCSDSYHGPSANSEVEVKSIVDFIKSHGKVKAFITLHSYSQLLMFPYGYKCTKLDDFDELSEVAQKAAQSLRSLHGTKYKVGPICSVIYQASGGSIDWSYDYGIKYSFAFELRDTGRYGFLLPARQILPTAEETWLGLKAIMEHVRDHPY

SEQ ID NO: 8 - protein, 270 aa, Homo sapiens
MMLRLLSSLLLVAVASGYGPPSSHSSSRVVHGEDAVPYSWPWQVSLQYEKSGSFYHTCGGSLIAPDWVVTAGHCISRDLTYQVVLGEYNLAVKEGPEQVIPINSEELFVHPLWNRSCVACGNDIALIKLSRSAQLGDAVQLASLPPAGDILPNKTPCYITGWGRLYTNGPLPDKLQQARLPVVDYKHCSRWNWWGSTVKKTMVCAGGYIRSGCNGDSGGPLNCPTEDGGWQVHGVTSFVSAFGCNFIWKPTVFTRVSAFIDWIEETIASH

SEQ ID NO: 9 - protein, 268 aa, Homo sapiens [sequence omitted]

SEQ ID NO: 10 - protein, 269 aa, Homo sapiens
MIRTLLLSTLVAGALSCGDPTYPPYVTRVVGGEEARPNSWPWQVSLQYSSNGKWYHTCGGSLIANSWVLTAAHCISSSRTYRVGLGRHNLYVAESGSLAVSVSKIVVHKDWNSNQISKGNDIALLKLANPVSLTDKIQLACLPPAGTILPNNYPCYVTGWGRLQTNGAVPDVLQQGRLLVVDYATCSSSAWWGSSVKTSMICAGGDGVISSCNGDSGGPLNCQASDGRWQVHGIVSFGSRLGCNYYHKPSVFTRVSNYIDWINSVIANN

SEQ ID NO: 11 - protein, 270 aa, Homo sapiens
MMLRLLSSLLLVAVASGYGPPSSRPSSRVVNGEDAVPYSWPWQVSLQYEKSGSFYHTCGGSLIAPDWVVTAGHCISSSRTYQVVLGEYDRAVKEGPEQVIPINSGDLFVHPLWNRSCVACGNDIALIKLSRSAQLGDAVQLASLPPAGDILPNETPCYITGWGRLYTNGPLPDKLQEALLPVVDYEHCSRWNWWGSSVKKTMVCAGGDIRSGCNGDSGGPLNCPTEDGGWQVHGVTSFVSAFGCNTRRKPTVFTRVSAFIDWIEETIASH

SEQ ID NO: 12 - protein, 247 aa, Homo sapiens
MNLLLILTFVAAAVAAPFDDDDKIVGGYICEENSVPYQVSLNSGYHFCGGSLISEQWVVSAGHCYKSRIQVRLGEHNIEVLEGNEQFINAAKIIRHPKYNSRTLDNDILLIKLSSPAVINSRVSAISLPTAPPAAGTESLISGWGNTLSSGADYPDELQCLDAPVLSQAECEASYPGKITNNMFCVGFLEGGKDSCQGDSGGPVVSNGELQGIVSWGYGCAQKNRPGVYTKVYNYVDWIKDTIAANS

SEQ ID NO: 13 - protein, 247 aa, Homo sapiens
MNPLLILTFVAAALAAPFDDDDKIVGGYNCEENSVPYQVSLNSGYHFCGGSLINEQWVVSAGHCYKSRIQVRLGEHNIEVLEGNEQFINAAKIIRHPQYDRKTLNNDIMLIKLSSRAVINARVSTISLPTAPPATGTKCLISGWGNTASSGADYPDELQCLDAPVLSQAKCEASYPGKITSNMFCVGFLEGGKDSCQGDSGGPVVCNGQLQGVVSWGDGCAQKNKPGVYTKVYNYVKWIKNTIAANS

SEQ ID NO: 14 - protein, 166 aa, Homo sapiens
MAQTSSYFMLISCLMFLSQSQGQEAQTELPQARISCPEGTNAYRSYCYYFNEDRETWVDADLYCQNMNSGNLVSVLTQAEGAFVASLIKESGTDDFNVWIGLHDPKKNRRWHWSSGSLVSYKSWGIGAPSSVNPGYCVSLTSSTGFQKWKDVPCEDKFSFVCKFKN

SEQ ID NO: 15 - protein, 263 aa, Homo sapiens
MAFLWLLSCWALLGTTFGCGVPAIHPVLSGLSRIVNGEDAVPGSWPWQVSLQDKTGFHFCGGSLISEDWVVTAAHCGVRTSDVVVAGEFDQGSDEENIQVLKIAKVFKNPKFSILTVNNDITLLKLATPARFSQTVSAVCLPSADDDFPAGTLCATTGWGKTKYNANKTPDKLQQAALPLLSNAECKKSWGRRITDVMICAGASGVSSCMGDSGGPLVCQKDGAWTLVGIVSWGSRTCSTTTPAVYARVAKLIPWVQKILAAN

SEQ ID NO: 16 - protein, 166 aa, Homo sapiens
MAQTNSFFMLISSLMFLSLSQGQESQTELPNPRISCPEGTNAYRSYCYYFNEDPETWVDADLYCQNMNSGNLVSVLTQAEGAFVASLIKESSTDDSNVWIGLHDPKKNRRWHWSSGSLVSYKSWDTGSPSSANAGYCASLTSCSGFKKWKDESCEKKFSFVCKFKN

SEQ ID NO: 17 - protein, 472 aa, Homo sapiens
MATKCGNCGPGYSTPLEAMKGPREEIVYLPCIYRNTGTEAPDYLATVDVDPKSPQYCQVIHRLPMPNLKDELHHSGWNTCSSCFGDSTKSRTKLVLPSLISSRIYVVDVGSEPRAPKLHKVIEPKDIHAKCELAFLHTSHCLASGEVMISSLGDVKGNGKGGFVLLDGETFEVKGTWERPGGAAPLGYDFWYQPRHNVMISTEWAAPNVLRDGFNPADVEAGLYGSHLYVWDWQRHEIVQTLSLKDGLIPLEIRFLHNPDAAQGFVGCALSSTIQRFYKNEGGTWSVEKVIQVPPKKVKGWLLPEMPGLITDILLSLDDRFLYFSNWLHGDLRQYDISDPQRPRLTGQLFLGGSIVKGGPVQVLEDEELKSQPEPLVVKGKRVAGGPQMIQLSLDGKRLYITTSLYSAWDKQFYPDLIREGSVMLQVDVDTVKGGLKLNPNFLVDFGKEPLGPALAHELRYPGGDCSSDIWI

SEQ ID NO: 18 - protein, 14507 aa, Homo sapiens
MLKPSGLPGSSSPTRSLMTGSRSTKATPEMDSGLTGATLSPKTSTGAIVVTEHTLPFTSPDKTLASPTSSVVGRTTQSLGVMSSALPESTSRGMTHSEQRTSPSLSPQVNGTPSRNYPATSMVSGLSSPRTRTSSTEGNFTKEASTYTLTVETTSGPVTEKYTVPTETSTTEGDSTETPWDTRYIPVKITSPMKTFADSTASKENAPVSMTPAETTVTDSHTPGRTNPSFGTLYSSFLDLSPKGTPNSRGETSLELILSTTGYPFSSPEPGSAGHSRISTSAPLSSSASVLDNKISETSIFSGQSLTSPLSPGVPEARASTMPNSAIPFSMTLSNAETSAERVRSTISSLGTPSISTKQTAETILTFHAFAETMDIPSTHIAKTLASEWLGSPGTLGGTSTSALTTTSPSTTLVSEETNTHHSTSGKETEGTLNTSMTPLETSAPGEESEMTATLVPTLGFTTLDSKIRSPSQVSSSHPTRELRTTGSTSGRQSSSTAAHGSSDILRATTSSTSKASSWTSESTAQQFSEPQHTQWVETSPSMKTERPPASTSVAAPITTSVPSVVSGFTTLKTSSTKGIWLEETSADTLIGESTAGPTTHQFAVPTGISMTGGSSTRGSQGTTHLLTRATASSETSADLTLATNGVPVSVSPAVSKTAAGSSPPGGTKPSYTMVSSVIPETSSLQSSAFREGTSLGLTPLNTRHPFSSPEPDSAGHTKISTSIPLLSSASVLEDKVSATSTFSHHKATSSITTGTPEISTKTKPSSAVLSSMTLSNAATSPERVRNATSPLTHPSPSGEETAGSVLTLSTSAETTDSPNIHPTGTLTSESSESPSTLSLPSVSGVKTTFSSSTPSTHLFTSGEETEETSNPSVSQPETSVSRVRTTLASTSVPTPVFPTMDTWPTRSAQFSSSHLVSELRATSSTSVTNSTGSALPKISHLTGTATMSQTNRDTFNDSAAPQSTTWPETSPRFKTGLPSATTTVSTSATSLSATVMVSKFTSPATSSMEATSIREPSTTILTTETTNGPGSMAVASTNIPIGKGYITEGRLDTSHLPIGTTASSETSMDFTMAKESVSMSVSPSQSMDAAGSSTPGRTSQFVDTFSDDVYHLTSREITIPRDGTSSALTPQMTATHPPSPDPGSARSTWLGILSSSPSSPTPKVTMSSTFSTQRVTTSMIMDTVETSRWNMPNLPSTTSLTPSNIPTSGAIGKSTLVPLDTPSPATSLEASEGGLPTLSTYPESTNTPSIHLGAHASSESPSTIKLTMASVVKPGSYTPLTFPSIETHIHVSTARMAYSSGSSPEMTAPGETNTGSTWDPTTYITTTDPKDTSSAQVSTPHSVRTLRTTENHPKTESATPAAYSGSPKISSSPNLTSPATKAWTITDTTEHSTQLHYTKLAEKSSGFETQSAPGPVSVVIPTSPTIGSSTLELTSDVPGEPLVLAPSEQTTITLPMATWLSTSLTEEMASTDLDISSPSSPMSTFAIFPPMSTPSHELSKSEADTSAIRNTDSTTLDQHLGIRSLGRTGDLTTVPITPLTTTWTSVIEHSTQAQDTLSATMSPTHVTQSLKDQTSIPASASPSHLTEVYPELGTQGRSSSEATTFWKPSTDTLSREIETGPTNIQSTPPMDNTTTGSSSSGVTLGIAHLPIGTSSPAETSTNMALERRSSTATVSMAGTMGLLVTSAPGRSISQSLGRVSSVLSESTTEGVTDSSKGSSPRLNTQGNTALSSSLEPSYAEGSQMSTSIPLTSSPTTPDVEFIGGSTFWTKEVTTVMTSDISKSSARTESSSATLMSTALGSTENTGKEKLRTASMDLPSPTPSMEVTPWISLTLSNAPNTTDSLDLSHGVHTSSAGTLATDRSLNTGVTRASRLENGSDTSSKSLSMGNSTHTSMTYTEKSEVSSSIHPRPETSAPGAETTLTSTPGNRAISLTLPFSSIPVEEVISTGITSGPDINSAPMTHSPITPPTIVWTSTGTIEQSTQPLHAVSSEKVSVQTQSTPYVNSVAVSASPTHENSVSSGSSTSSPYSSASLESLDSTISRRNAITSWLWDLTTSLPTTTWPSTSLSEALSSGHSGVSNPSSTTTEFPLFSAASTSAAKQRNPETETHGPQNTAASTLNTDASSVTGLSETPVGASISSEVPLPMAITSRSDVSGLTSESTANPSLGTASSAGTKLTRTISLPTSESLVSFRMNKDPWTVSIPLGSHPTTNTETSIPVNSAGPPGLSTVASDVIDTPSDGAESIPTVSFSPSPDTEVTTISHFPEKTTHSFRTISSLTHELTSRVTPIPGDWMSSAMSTKPTGASPSITLGERRTITSAAPTTSPIVLTASFTETSTVSLDNETTVKTSDILDARKTNELPSDSSSSSDLINTSIASSTMDVTKTASISPTSISGMTASSSPSLFSSDRPQVPTSTTETNTATSPSVSSNTYSLDGGSNVGGTPSTLPPFTITHPVETSSALLAWSRPVRTFSTMVSTDTASGENPTSSNSVVTSVPAPGTWTSVGSTTDLPAMGFLKTSPAGEAHSLLASTIEPATAFTPHLSAAVVTGSSATSEASLLTTSESKAIHSSPQTPTTPTSGANWETSATPESLLVVTETSDTTLTSKILVTDTILFSTVSTPPSKFPSTGTLSGASFPTLLPDTPAIPLTATEPTSSLATSFDSTPLVTIASDSLGTVPETTLTMSETSNGDALVLKTVSNPDRSIPGITIQGVTESPLHPSSTSPSKIVAPRNTTYEGSITVALSTLPAGTTGSLVFSQSSENSETTALVDSSAGLERASVMPLTTGSQGMASSGGIRSGSTHSTGTKTFSSLPLTMNPGEVTAMSEITTNRLTATQSTAPKGIPVKPTSAESGLLTPVSASSSPSKAFASLTTAPPTWGIPQSTLTFEFSEVPSLDTKSASLPTPGQSLNTIPDSDASTASSSLSKSPEKNPRARMMTSTKAISASSFQSTGFTETPEGSASPSMAGHEPRVPTSGTGDPRYASESMSYPDPSKASSAMTSTSLASKLTTLFSTGQAARSGSSSSPISLSTEKETSFLSPTASTSRKTSLFLGPSMARQPNILVHLQTSALTLSPTSTLNMSQEEPPELTSSQTIAEEEGTTAETQTLTFTPSETPTSLLPVSSPTEPTARRKSSPETWASSISVPAKTSLVETTDGTLVTTIKMSSQAAQGNSTWPAPAEETGSSPAGTSPGSPEMSTTLKIMSSKEPSISPEIRSTVRNSPWKTPETTVPMETTVEPVTLQSTALGSGSTSISHLPTGTTSPTKSPTENMLATERVSLSPSPPEAWTNLYSGTPGGTRQSLATMSSVSLESPTARSITGTGQQSSPELVSKTTGMEFSMWHGSTGGTTGDTHVSLSTSSNILEDPVTSPNSVSSLTDKSKHKTETWVSTTAIPSTVLNNKIMAAEQQTSRSVDEAYSSTSSWSDQTSGSDITLGASPDVTNTLYITSTAQTTSLVSLPSGDQGITSLTNPSGGKTSSASSVTSPSIGLETLRANVSAVKSDIAPTAGHLSQTSSPAEVSILDVTTAPTPGISTTITTMGTNSISTTTPNPEVGMSTMDSTPATERRTTSTEHPSTWSSTAASDSWTVTDMTSNLKVARSPGTISTMHTTSFLASSTELDSMSTPHGRITVIGTSLVTPSSDASAVKTETSTSERTLSPSDTTASTPISTFSRVQRMSISVPDILSTSWTPSSTEAEDVPVSMVSTDHASTKTDPNTPLSTFLFDSLSTLDWDTGRSLSSATATTSAPQGATTPQELTLETMISPATSQLPFSIGHITSAVTPAAMARSSGVTFSRPDPTSKKAEQTSTQLPTTTSAHPGQVPRSAATTLDVIPHTAKTPDATFQRQGQTALTTEARATSDSWNEKEKSTPSAPWITEMMNSVSEDTIKEVTSSSSVLRTLNTLDINLESGTTSSPSWKSSPYERIAPSESTTDKEAIHPSTNTVETTGWVTSSEHASHSTIPAHSASSKLTSPVVTTSTREQAIVSMSTTTWPESTRARTEPNSFLTIELRDVSPYMDTSSTTQTSIISSPGSTAITKGPRTEITSSKRISSSFLAQSMRSSDSPSEAITRLSNFPAMTESGGMILAMQTSPPGATSLSAPTLDTSATASWTGTPLATTQRFTYSEKTTLFSKGPEDTSQPSPPSVEETSSSSSLVPIHATTSPSNILLTSQGHSPSSTPPVTSVFLSETSGLGKTTDMSRISLEPGTSLPPNLSSTAGEALSTYEASRDTKAIHHSADTAVTNMEATSSEYSPIPGHTKPSKATSPLVTSHIMGDITSSTSVFGSSETTEIETVSSVNQGLQERSTSQVASSATETSTVITHVSSGDATTHVTKTQATFSSGTSISSPHQFITSTNTFTDVSTNPSTSLIMTESSGVTITTQTGPTGAATQGPYLLDTSTMPYLTETPLAVTPDFMQSEKTTLISKGPKDVSWTSPPSVAETSYPSSLTPFLVTTIPPATSTLQGQHTSSPVSATSVLTSGLVKTTDMLNTSMEPVTNSPQNLNNPSNEILATLAATTDIETIHPSINKAVTNMGTASSAHVLHSTLPVSSEPSTATSPMVPASSMGDALASISIPGSETTDIEGEPTSSLTAGRKENSTLQEMNSTTESNIILSNVSVGAITEATKMEVPSFDATFIPTPAQSTKFPDIFSVASSRLSNSPPMTISTHMTTTQTGSSGATSKIPLALDTSTLETSAGTPSVVTEGFAHSKITTAMNNDVKDVSQTNPPFQDEASSPSSQAPVLVTTLPSSVAFTPQWHSTSSPVSMSSVLTSSLVKTAGKVDTSLETVTSSPQSMSNTLDDISVTSAATTDIETTHPSINTVVTNVGTTGSAFESHSTVSAYPEPSKVTSPNVTTSTMEDTTISRSIPKSSKTTRTETETTSSLTPKLRETSISQEITSSTETSTVPYKELTGATTEVSRTDVTSSSSTSFPGPDQSTVSLDISTETNTRLSTSPIMTESAEITITTQTGPHGATSQDTFTMDPSNTTPQAGIHSAMTHGFSQLDVTTLMSRIPQDVSWTSPPSVDKTSSPSSFLSSPAMTTPSLISSTLPEDKLSSPMTSLLTSGLVKITDILRTRLEPVTSSLPNFSSTSDKILATSKDSKDTKEIFPSINTEETNVKANNSGHESHSPALADSETPKATTQMVITTTVGDPAPSTSMPVHGSSETTNIKREPTYFLTPRLRETSTSQESSFPTDTSFLLSKVPTGTITEVSSTGVNSSSKISTPDHDKSTVPPDTFTGEIPRVFTSSIKTKSAEMTITTQASPPESASHSTLPLDTSTTLSQGGTHSTVTQGFPYSEVTTLMGMGPGNVSWMTTPPVEETSSVSSLMSSPAMTSPSPVSSTSPQSIPSSPLPVTALPTSVLVTTTDVLGTTSPESVTSSPPNLSSITHERPATYKDTAHTEAAMHHSTNTAVTNVGTSGSGHKSQSSVLADSETSKATPLMSTTSTLGDTSVSTSTPNISQTNQIQTEPTASLSPRLRESSTSEKTSSTTETNTAFSYVPTGAITQASRTEISSSRTSISDLDRPTIAPDISTGMITRLFTSPIMTKSAEMTVTTQTTTPGATSQGILPWDTSTTLFQGGTHSTVSQGFPHSEITTLRSRTPGDVSWMTTPPVEETSSGFSLMSPSMTSPSPVSSTSPESIPSSPLPVTALLTSVLVTTTNVLGTTSPEPVTSSPPNLSSPTQERLTTYKDTAHTEAMHASMHTNTAVANVGTSISGHESQSSVPADSHTSKATSPMGITFAMGDTSVSTSTPAFFETRIQTESTSSLIPGLRDTRTSEEINTVTETSTVLSEVPTTTTTEVSRTEVITSSRTTISGPDHSKMSPYISTETITRLSTFPFVTGSTEMAITNQTGPIGTISQATLTLDTSSTASWEGTHSPVTQRFPHSEETTTMSRSTKGVSWQSPPSVEETSSPSSPVPLPAITSHSSLYSAVSGSSPTSALPVTSLLTSGRRKTIDMLDTHSELVTSSLPSASSFSGEILTSEASTNTETIHFSENTAETNMGTTNSMHKLHSSVSIHSQPSGHTPPKVTGSMMEDAIVSTSTPGSPETKNVDRDSTSPLTPELKEDSTALVMNSTTESNTVFSSVSLDAATEVSRAEVTYYDPTFMPASAQSTKSPDISPEASSSHSNSPPLTISTHKTIATQTGPSGVTSLGQLTLDTSTIATSAGTPSARTQDFVDSETTSVMNNDLNDVLKTSPFSAEEANSLSSQAPLLVTTSPSPVTSTLQEHSTSSLVSVTSVPTPTLAKITDMDTNLEPVTRSPQNLRNTLATSEATTDTHTMHPSINTAVANVGTTSSPNEFYFTVSPDSDPYKATSAVVITSTSGDSIVSTSMPRSSAMKKIESETTFSLIFRLRETSTSQKIGSSSDTSTVFDKAFTAATTEVSRTELTSSSRTSIQGTEKPTMSPDTSTRSVTMLSTFAGLTKSEERTIATQTGPHRATSQGTLTWDTSITTSQAGTHSAMTHGFSQLDLSTLTSRVPEYISGTSPPSVEKTSSSSSLLSLPAITSPSPVPTTLPESRPSSPVHLTSLPTSGLVKTTDMLASVASLPPNLGSTSHKIPTTSEDIKDTEKMYPSTNIAVTNVGTTTSEKESYSSVPAYSEPPKVTSPMVTSFNIRDTIVSTSMPGSSEITRIEMESTFSLAHGLKGTSTSQDPIVSTEKSAVLHKLTTGATETSRTEVASSRRTSIPGPDHSTESPDISTEVIPSLPISLGITESSNMTIITRTGPPLGSTSQGTFTLDTPTTSSRAGTHSMATQEFPHSEMTTVMNKDPEILSWTIPPSIEKTSFSSSLMPSPAMTSPPVSSTLPKTIHTTPSPMTSLLTPSLVMTTDTLGTSPEPTTSSPPNLSSTSHEILTTDEDTTAIEAMHPSTSTAATNVETTSSGHGSQSSVLADSEKTKATAPMDTTSTMGHTTVSTSMSVSSETTKIKRESTYSLTPGLRETSISQNASFSTDTSIVLSEVPTGTTAEVSRTEVTSSGRTSIPGPSQSTVLPEISTRTMTRLFASPTMTESAEMTIPTQTGPSGSTSQDTLTLDTSTTKSQAKTHSTLTQRFPHSEMTTLMSRGPGDMSWQSSPSLENPSSLPSLLSLPATTSPPPISSTLPVTISSSPLPVTSLLTSSPVTTTDMLHTSPELVTSSPPKLSHTSDERLTTGKDTTNTEAVHPSTNTAASNVEIPSSGHESPSSALADSETSKATSPMFITSTQEDTTVAISTPHFLETSRIQKESISSLSPKLRETGSSVETSSAIETSAVLSEVSIGATTEISRTEVTSSSRTSISGSAESTMLPEISTTRKIIKFPTSPILAESSEMTIKTQTSPPGSTSESTFTLDTSTTPSLVITHSTMTQRLPHSEITTLVSRGAGDVPRPSSLPVEETSPPSSQLSLSAMISPSPVSSTLPASSHSSSASVTSLLTPGQVKTTEVLDASAEPETSSPPSLSSTSVEILATSEVTTDTEKIHPFSNTAVTKVGTSSSGHESPSSVLPDSETTKATSAMGTISIMGDTSVSTLTPALSNTRKIQSEPASSLTTRLRETSTSEETSLATEANTVLSKVSTGATTEVSRTEAISFSRTSMSGPEQSTMSQDISIGTIPRISASSVLTESAKMTITTQTGPSESTLESTLNLNTATTPSWVETHSIVIQGFPHPEMTTSMGRGPGGVSWPSPPFVKETSPPSSPLSLPAVTSPHPVSTTFLAHIPPSPLPVTSLLTSGPATTTDILGTSTEPGTSSSSSLSTTSHERLTTYKDTAHTEAVHPSTNTGGTNVATTSSGYKSQSSVLADSSPMCTTSTMGDTSVLTSTPAFLETRRIQTELASSLTPGLRESSGSEGTSSGTKMSTVLSKVPTGATTEISKEDVTSIPGPAQSTISPDISTRTVSWFSTSPVMTESAEITMNTHTSPLGATTQGTSTLDTSSTTSLTMTHSTISQGFSHSQMSTLMRRGPEDVSWMSPPLLEKTRPSFSLMSSPATTSPSPVSSTLPESISSSPLPVTSLLTSGLAKTTDMLHKSSEPVTNSPANLSSTSVEILATSEVTTDTEKTHPSSNRTVTDVGTSSSGHESTSFVLADSQTSKVTSPMVITSTMEDTSVSTSTPGFFETSRIQTEPTSSLTLGLRKTSSSEGTSLATEMSTVLSGVPTGATAEVSRTEVTSSSRTSISGFAQLTVSPETSTETITRLPTSSIMTESAEMMIKTQTDPPGSTPESTHTVDISTTPNWVETHSTVTQRFSHSEMTTLVSRSPGDMLWPSQSSVEETSSASSLLSLPATTSPSPVSSTLVEDFPSASLPVTSLLNPGLVITTDRMGISREPGTSSTSNLSSTSHERLTTLEDTVDTEDMQPSTHTAVTNVRTSISGHESQSSVLSDSETPKATSPMGTTYTMGETSVSISTSDFFETSRIQIEPTSSLTSGLRETSSSERISSATEGSTVLSEVPSGATTEVSRTEVISSRGTSMSGPDQFTISPDISTEAITRLSTSPIMTESAESAITIETGSPGATSEGTLTLDTSTTTFWSGTHSTASPGFSHSEMTTLMSRTPGDVPWPSLPSVEEASSVSSSLSSPAMTSTSFFSTLPESISSSPHPVTALLTLGPVKTTDMLRTSSEPETSSPPNLSSTSAEILATSEVTKDREKIHPSSNTPVVNVGTVIYKHLSPSSVLADLVTTKPTSPMATTSTLGNTSVSTSTPAFPETMMTQPTSSLTSGLREISTSQETSSATERSASLSGMPTGATTKVSRTEALSLGRTSTPGPAQSTISPEISTETITRISTPLTTTGSAEMTITPKTGHSGASSQGTFTLDTSSRASWPGTHSAATHRSPHSGMTTPMSRGPEDVSWPSRPSVEKTSPPSSLVSLSAVTSPSPLYSTPSESSHSSPLRVTSLFTPVMMKTTDMLDTSLEPVTTSPPSMNITSDESLATSKATMETEAIQLSENTAVTQMGTISARQEFYSSYPGLPEPSKVTSPVVTSSTIKDIVSTTIPASSEITRIEMESTSTLTPTPRETSTSQEIHSATKPSTVPYKALTSATIEDSMTQVMSSSRGPSPDQSTMSQDISTEVITRLSTSPIKTESTEMTITTQTGSPGATSRGTLTLDTSTTFMSGTHSTASQGFSHSQMTALMSRTPGDVPWLSHPSVEEASSASFSLSSPVMTSSSPVSSTLPDSIHSSSLPVTSLLTSGLVKTTELLGTSSEPETSSPPNLSSTSAEILAITEVTTDTEKLEMTNVVTSGYTHESPSSVLADSVTTKATSSMGITYPTGDTNVLTSTPAFSDTSRIQTKSKLSLTPGLMETSISEETSSATEKSTVLSSVPTGATTEVSRTEAISSSRTSIPGPAQSTMSSDTSMETITRISTPLTRKESTDMAITPKTGPSGATSQGTFTLDSSSTASWPGTHSATTQRFPQSVVTTPMSRGPEDVSWPSPLSVEKNSPPSSLVSSSSVTSPSPLYSTPSGSSHSSPVPVTSLFTSIMMKATDMLDASLEPETTSAPNMNITSDESLAASKATTETEAIHVFENTAASHVETTSATEELYSSSPGFSEPTKVISPVVTSSSIRDNMVSTTMPGSSGITRIEIESMSSLTPGLRETRTSQDITSSTETSTVLYKMPSGATPEVSRTEVMPSSRTSIPGPAQSTMSLDISDEVVTRLSTSPIMTESAEITITTQTGYSLATSQVTLPLGTSMTFLSGTHSTMSQGLSHSEMTNLMSRGPESLSWTSPRFVETTRSSSSLTSLPLTTSLSPVSSTLLDSSPSSPLPVTSLILPGLVKTTEVLDTSSEPKTSSSPNLSSTSVEIPATSEIMTDTEKIHPSSNTAVAKVRTSSSVHESHSSVLADSETTITIPSMGITSAVDDTTVFTSNPAFSETRRIPTEPTFSLTPGFRETSTSEETTSITETSAVLYGVPTSATTEVSMTEIMSSNRIHIPDSDQSTMSPDIITEVITRLSSSSMMSESTQMTITTQKSSPGATAQSTLTLATTTAPLARTHSTVPPRFLHSEMTTLMSRSPENPSWKSSLFVEKTSSSSSLLSLPVTTSPSVSSTLPQSIPSSSFSVTSLLTPGMVKTTDTSTEPGTSLSPNLSGTSVEILAASEVTTDTEKIHPSSSMAVTNVGTTSSGHELYSSVSIHSEPSKATYPVGTPSSMAETSISTSMPANFETTGFEAEPFSHLTSGFRKTNMSLDTSSVTPTNTPSSPGSTHLLQSSKTDFTSSAKTSSPDWPPASQYTEIPVDIITPFNASPSITESTGITSFPESRFTMSVTESTHHLSTDLLPSAETISTGTVMPSLSEAMTSFATTGVPRAISGSGSPFSRTESGPGDATLSTIAESLPSSTPVPFSSSTFTTTDSSTIPALHEITSSSATPYRVDTSLGTESSTTEGRLVMVSTLDTSSQPGRTSSSPILDTRMTESVELGTVTSAYQVPSLSTRLTRTDGIMEHITKIPNEAAHRGTIRPVKGPQTSTSPASPKGLHTGGTKRMETTTTALKTTTTALKTTSRATLTTSVYTPTLGTLTPLNASMQMASTIPTEMMITTPYVFPDVPETTSSLATSLGAETSTALPRTTPSVFNRESETTASLVSRSGAERSPVIQTLDVSSSEPDTTASWVIHPAETIPTVSKTTPNFFHSELDTVSSTATSHGADVSSAIPTNISPSELDALTPLVTISGTDTSTTFPTLTKSPHETETRTTWLTHPAETSSTIPRTIPNFSHHESDATPSIATSPGAETSSAIPIMTVSPGAEDLVTSQVTSSGTDRNMTIPTLTLSPGEPKTIASLVTHPEAQTSSAIPTSTISPAVSRLVTSMVTSLAAKTSTTNRALTNSPGEPATTVSLVTHPAQTSPTVPWTTSIFFHSKSDTTPSMTTSHGAESSSAVPTPTVSTEVPGVVTPLVTSSRAVISTTIPILTLSPGEPETTPSMATSHGEEASSAIPTPTVSPGVPGVVTSLVTSSRAVTSTTIPILTFSLGEPETTPSMATSHGTEAGSAVPTVLPEVPGMVTSLVASSRAVTSTTLPTLTLSPGEPETTPSMATSHGAEASSTVPTVSPEVPGVVTSLVTSSSGVNSTSIPTLILSPGELETTPSMATSHGAEASSAVPTPTVSPGVSGVVTPLVTSSRAVTSTTIPILTLSSSEPETTPSMATSHGVEASSAVLTVSPEVPGMVTSLVTSSRAVTSTTIPTLTISSDEPETTTSLVTHSEAKMISAIPTLAVSPTVQGLVTSLVTSSGSETSAFSNLTVASSQPETIDSWVAHPGTEASSVVPTLTVSTGEPFTNISLVTHPAESSSTLPRTTSRFSHSELDTMPSTVTSPEAESSSAISTTISPGIPGVLTSLVTSSGRDISATFPTVPESPHESEATASWVTHPAVTSTTVPRTTPNYSHSEPDTTPSIATSPGAEATSDFPTITVSPDVPDMVTSQVTSSGTDTSITIPTLTLSSGEPETTTSFITYSETHTSSAIPTLPVSPGASKMLTSLVISSGTDSTTTFPTLTETPYEPETTAIQLIHPAETNTMVPRTTPKFSHSKSDTTLPVAITSPGPEASSAVSTTTISPDMSDLVTSLVPSSGTDTSTTFPTLSETPYEPETTATWLTHPAETSTTVSGTIPNFSHRGSDTAPSMVTSPGVDTRSGVPTTTIPPSIPGVVTSQVTSSATDTSTAIPTLTPSPGEPETTASSATHPGTQTGFTVPIRTVPSSEPDTMASWVTHPPQTSTPVSRTTSSFSHSSPDATPVMATSPRTEASSAVLTTISPGAPEMVTSQITSSGAATSTTVPTLTHSPGMPETTALLSTHPRTETSKTFPASTVFPQVSETTASLTIRPGAETSTALPTQTTSSLFTLLVTGTSRVDLSPTASPGVSAKTAPLSTHPGTETSTMIPTSTLSLGLLETTGLLATSSSAETSTSTLTLTVSPAVSGLSSASITTDKPQTVTSWNTETSPSVTSVGPPEFSRTVTGTTMTLIPSEMPTPPKTSHGEGVSPTTILRTTMVEATNLATTGSSPTVAKTTTTFNTLAGSLFTPLTTPGMSTLASESVTSRTSYNHRSWISTTSSYNRRYWTPATSTPVTSTFSPGISTSSIPSSTAATVPFMVPFTLNFTITNLQYEEDMRHPGSRKFNATERELQGLLKPLFRNSSLEYLYSGCRLASLRPEKDSSATAVDAICTHRPDPEDLGLDRERLYWELSNLTNGIQELGPYTLDRNSLYVNGFTHRSSMPTTSTPGTSTVDVGTSGTPSSSPSPTTAGPLLMPFTLNFTITNLQYEEDMRRTGSRKFNTMESVLQGLLKPLFKNTSVGPLYSGCRLTLLRPEKDGAATGVDAICTHRLDPKSPGLNREQLYWELSKLTNDIEELGPYTLDRNSLYVNGFTHQSSVSTTSTPGTSTVDLRTSGTPSSLSSPTIMAAGPLLVPFTLNFTITNLQYGEDMGHPGSRKFNTTERVLQGLLGPIFKNTSVGPLYSGCRLTSLRSEKDGAATGVDAICIHHLDPKSPGLNRERLYWELSQLTNGIKELGPYTLDRNSLYVNGFTHRTSVPTSSTPGTSTVDLGTSGTPFSLPSPATAGPLLVLFTLNFTITNLKYEEDMHRPGSRKFNTTERVLQTLLGPMFKNTSVGLLYSGCRLTLLRSEKDGAATGVDAICTHRLDPKSPGVDREQLYWELSQLTNGIKELGPYTLDRNSLYVNGFTHWIPVPTSSTPGTSTVDLGSGTPSSLPSPTTAGPLLVPFTLNFTITNLKYEEDMHCPGSRKFNTTERVLQSLLGPMFKNTSVGPLYSGCRLTLLRSEKDGAATGVDAICTHRLDPKSPGVDREQLYWELSQLTNGIKELGPYTLDRNSLYVNGFTHQTSAPNTSTPGTSTVDLGTSGTPSSLPSPTSAGPLLVPFTLNFTITNLQYEEDMHHPGSRKFNTTERVLQGLLGPMFKNTSVGLLYSGCRLTLLRPEKNGAATGMDAICSHRLDPKSPGLNREQLYWELSQLTHGIKELGPYTLDRNSLYVNGFTHRSSVAPTSTPGTSTVDLGTSGTPSSLPSPTTAVPLLVPFTLNFTITNLQYGEDMRHPGSRKFNTTERVLQGLLGPLFKNSSVGPLYSGCRLISLRSEKDGAATGVDAICTHHLNPQSPGLDREQLYWQLSQMTNGIKELGPYTLDRNSLYVNGFTHRSSGLTTSTPWTSTVDLGTSGTPSPVPSPTTTGPLLVPFTLNFTITNLQYEENMGHPGSRKFNITESVLQGLLKPLFKSTSVGPLYSGCRLTLLRPEKDGVATRVDAICTHRPDPKIPGLDRQQLYWELSQLTHSITELGPYTLDRDSLYVNGFTQRSSVPTTSTPGTFTVQPETSETPSSLPGPTATGPVLLPFTLNFTITNLQYEEDMRRPGSRKFNTTERVLQGLLMPLFKNTSVSSLYSGCRLTLLRPEKDGAATRVDAVCTHRPDPKSPGLDRERLYWKLSQLTHGITELGPYTLDRHSLYVNGFTHQSSMTTTRTPDTSTMHLATSRTPASLSGPMTASPLLVLFTINFTITNLRYEENMHHPGSRKFNTTERVLQGLLRPVFKNTSVGPLYSGCRLTLLRPKKDGAATKVDAICTYRPDPKSPGLDREQLYWELSQLTHSITELGPYTLDRDSLYVNGFTQRSSVPTTSIPGTPTVDLGTSGTPVSKPGPSAASPLLVLFTLNFTITNLRYEENMQHPGSRKFNTTERVLQGLLRSLFKSTSVGPLYSGCRLTLLRPEKDGTATGVDAICTHHPDPKSPRLDREQLYWELSQLTHNITELGPYALDNDSLFVNGFTHRSSVSTTSTPGTPTVYLGASKTPASIFGPSAASHLLILFTLNFTITNLRYEENMWPGSRKFNTTERVLQGLLRPLFKNTSVGPLYSGCRLTLLRPEKDGEATGVDAICTHRPDPTGPGLDREQLYLELSQLTHSITELGPYTLDRDSLYVNGFTHRSSVPTTSTGVVSEEPFTLNFTINNLRYMADMGQPGSLKFNITDNVMQHLLSPLFQRSSLGARYTGCRVIALRSVKNGAETRVDLLCTYLQPLSGPGLPIKQVFHELSQQTHGITRLGPYSLDKDSLYLNGYNEPGPDEPPTTPKPATTFLPPLSEATTAMGYHLKTLTLNFTISNLQYSPDMGKGSATFNSTEGVLQHLLRPLFQKSSMGPFYLGCQLISLRPEKDGAATGVDTTCTYHPDPVGPGLDIQQLYWELSQLTHGVTQLGFYVLDRDSLFINGYAPQNLSIRGEYQINFHIVNWNLSNPDPTSSEYITLLRDIQDKVTTLYKGSQLHDTFRFCLVTNLTMDSVLVTVKALFSSNLDPSLVEQVFLDKTLNASFHWLGSTYQLVDIHVTEMESSVYQPTSSSSTQHFYLNFTITNLPYSQDKAQPGTTNYQRNKRNIEDALNQLFRNSSIKSYFSDCQVSTFRSVPNRHHTGVDSLCNFSPLARRVDRVAIYEEFLRMTRNGTQLQNFTLDRSSVLVDGYSPNRNEPLTGNSDLPFWAVILIGLAGLLGVITCLICGVLVTTRRRKKEGEYNVQQQCPGYYQSHLDLEDLQ

SEQ ID NO: 19 - protein, 5179 aa, Homo sapiens
MGLPLARLAAVCLALSLAGGSELQTEGRTRNHGHNVCSTWGNFHYKTFDGDVFRFPGLCDYNFASDCRGSYKEFAVHLKRGPGQAEAPAGVESILLTIKDDTIYLTRHLAVLNGAVVSTPHYSPGLLIEKSDAYTKVYSRAGLTLMWNREDALMLELDTKFRNHTCGLCGDYNGLQSYSEFLSDGVLFSPLEFGNMQKINQPDVVCEDPEEEVAPASCSEHRAECERLLTAEAFADCQDLVPLEPYLRACQQDRCRCPGGDTCVCSTVAEFSRQCSHAGGRPGNWRTATLCPKTCPGNLVYLESGSPCMDTCSHLEVSSLCEEHRMDGCFCPEGTVYDDIGDSGCVPVSQCHCRLHGHLYTPGQEITNDCEQCVCNAGRWVCKDLPCPGTCALEGGSHITTFDGKTYTFHGDCYYVLAKGDHNDSYALLGELAPCGSTDKQTCLKTVVLLADKKKNVVVFKSDGSVLLNELQVNLPHVTASFSVFRPSSYHIMVSMAIGVRLQVQLAPVMQLFVTLDQASQGQVQGLCGNFNGLEGDDFKTASGLVEATGAGFANTWKAQSSCHDKLDWLDDPCSLNIESANYAEHWCSLLKKTETPFGRCHSAVDPAEYYKRCKYDTCNCQNNEDCLCAALSSYARACTAKGVMLWGWREHVCNKDVGSCPNSQVFLYNLTTCQQTCRSLSEADSHCLEGFAPVDGCGCPDHTFLDEKGRCVPLAKCSCYHRGLYLEAGDVVVRQEERCVCRDGRLHCRQIRLIGQSCTAPKIHMDCSNLTALATSKPRALSCQTLAAGYYHTECVSGCVCPDGLMDDGRGGCVVEKECPCVHNNDLYSSGAKIKVDCNTCTCKRGRWVCTQAVCHGTCSIYGSGHYITFDGKYYDFDGHCSYVAVQDYCGQNSSLGSFSIITENVPCGTTGVTCSKAIKIFMGRTELKLEDKHRVVIQRDEGHHVAYTTREVGQYLVVESSTGIIVIWDKRTTVFIKLAPSYKGTVCGLCGNFDHRSNNDFTTRDHMVVSSELDFGNSWKEAPTCPDVSTNPEPCSLNPHRRSWAEKQCSILKSSVFSICHSKVDPKPFYEACVHDSCSCDTGGDCECFCSAVASYAQECTKEGACVFWRTPDLCPIFCDYYNPPHECEWHYEPCGNRSFETCRTINGIHSNISVSYLEGCYPRCPKDRPIYEEDLKKCVTADKCGCYVEDTHYPPGASVPTEETCKSCVCTNSSQVVCRPEEGKILNQTQDGAFCYWEICGPNGTVEKHFNICSITTRPSTLTTFTTITLPTTPTTFTTTTTTTTPTSSTVLSTTPKLCCLWSDWINEDHPSSGSDDGDRETFDGVCGAPEDIECRSVKDPHLSLEQLGQKVQCDVSVGFICKNEDQFGNGPFGLCYDYKIRVNCCWPMDKCITTPSPPTTTPSPPPTSTTTLPPTTTPSPPTTTTTTPPPTTTPSPPITTTTTPPPTTTPSPPISTTTTPPPTTTPSPPTTTPSPPTTTPSPPTTTTTTPPPTTTPSPPTTTPITPPASTTTLPPTTTPSPPTTTTTTPPPTTTPSPPTTTPITPPTSTTTLPPTTTPSPPPTTTTTPPPTTTPSPPTTTTPSPPTITTTTPPPTTTPSPPTTTTTTPPPTTTPSPPTTTPITPPTSTTTLPPTTTPSPPPTTTTTPPPTTTPSPPTTTTPSPPITTTTTPPPTTTPSSPITTTPSPPTTTMTTPSPTTTPSSPITTTTTPSSTTTPSPPPTTMTTPSPTTTPSPPTTTMTTLPPTTTSSPLTTTPLPPSITPPTFSPFSTTTPTTPCVPLCNWTGWLDSGKPNFHKPGGDTELIGDVCGPGWAANISCRATMYPDVPIGQLGQTVVCDVSVGLICKNEDQKPGGVIPMAFCLNYEINVQCCECVTQPTTMTTTTTENPTPPTTTPITTTTTVTPTPTPTGTQTPTTTPITTTTTVTPTPTPTGTQTPTTTPITTTTTVTPTPTPTGTQTPTTTPITTTTTVTPTPTPTGTQTPTTTPITTTTTVTPTPTPTGTQTPTTTPITTTTTVTPTPTPTGTQTPTTTPITTTTTVTPTPTPTGTQTPTTTPITTTTTVTPTPTPTGTQTPTTTPITTTTTVTPTPTPTGTQTPTTTPITTTTTVTPTPTPTGTQTPTTTPITTTTTVTPTPTPTGTQTPTTTPITTTTTVTPTPTPTGTQTPTTTPITTTTTVTPTPTPTGTQTPTTTPITTTTTVTPTPTPTGTQTPTTTPITTTTTVTPTPTPTGTQTPTTTPITTTTTVTPTPTPTGTQTPTTTPITTTTTVTPTPTPTGTQTPTTTPITTTTTVTPTPTPTGTQTPTTTPITTTTTVTPTPTPTGTQTPTTTPITTTTTVTPTPTPTGTQTPTTTPITTTTTVTPTPTPTGTQTPTTTPITTTTTVTPTPTPTGTQTPTTTPITTTTTVTPTPTPTGTQTPTTTPITTTTTVTPTPTPTGTQTPTTTPITTTTTVTPTPTPTGTQTPTTTPITTTTTVTPTPTPTGTQTPTTTPITTTTTVTPTPTPTGTQTPTTTPITTTTTVTPTPTPTGTQTPTTTPITTTTTVTPTPTPTGTQTPTTTPITTTTTVTPTPTPTGTQTPTTTPITTTTTVTPTPTPTGTQTPTTTPITTTTTVTPTPTPTGTQTPTTTPITTTTTVTPTPTPTGTQTPTTTPITTTTTVTPTPTPTGTQTPTTTPITTTTTVTPTPTPTGTQTPTTTPITTTTTVTPTPTPTGTQTPTTTPITTTTTVTPTPTPTGTQTPTTTPITTTTTVTPTPTPTGTQTPTTTPITTTTTVTPTPTPTGTQTPTTTPITTTTTVTPTPTPTGTQTPTTTPITTTTTVTPTPTPTGTQTPTTTPITTTTTVTPTPTPTGTQTPTTTPITTTTTVTPTPTPTGTQTPTTTPITTTTTVTPTPTPTGTQTPTTTPITTTTTVTPTPTPTGTQTPTTTPITTTTTVTPTPTPTGTQTPTTTPITTTTTVTPTPTPTGTQTPTTTPITTTTTVTPTPTPTGTQTPTTTPITTTTTVTPTPTPTGTQTPTTTPITTTTTVTPTPTPTGTQTPTTTPITTTTTVTPTPTPTGTQTPTTTPITTTTTVTPTPTPTGTQTPTTTPITTTTTVTPTPTPTGTQTPTTTPITTTTTVTPTPTPTGTQTPTTTPITTTTTVTPTPTPTGTQTPTTTPITTTTTVTPTPTPTGTQTPTTTPITTTTTVTPTPTPTGTQTPTTTPITTTTTVTPTPTPTGTQTPTTTPITTTTTVTPTPTPTGTQTPTTTPITTTTTVTPTPTPTGTQTPTTTPITTTTTVTPTPTPTGTQTPTTTPITTTTTVTPTPTPTGTQTPTTTPITTTTTVTPTPTPTGTQTPTTTPITTTTTVTPTPTPTGTQTPTTTPITTTTTVTPTPTPTGTQTPTTTPITTTTTVTPTPTPTGTQTPTTTPITTTTTVTPTPTPTGTQTPTTTPITTTTTVTPTPTPTGTQTPTTTPITTTTTVTPTPTPTGTQTPTTTPITTTTTVTPTPTPTGTQTPTTTPITTTTTVTPTPTPTGTQTPTTTPITTTTTVTPTPTPTGTQTPTTTPITTTTTVTPTPTPTGTQTPTTTPITTTTTVTPTPTPTGTQTPTTTPITTTTTVTPTPTPTGTQTPTTTPITTTTTVTPTPTPTGTQTPTTTPITTTTTVTPTPTPTGTQTPTTTPITTTTTVTPTPTPTGTQTPTTTPITTTTTVTPTPTPTGTQTPTTTPITTTTTVTPTPTPTGTQTPTTTPITTTTTVTPTPTPTGTQTPTTTPITTTTTVTPTPTPTGTQTPTTTPITTTTTVTPTPTPTGTQTPTTTPITTTTTVTPTPTPTGTQTPTTTPITTTTTVTPTPTPTGTQTPTTTPITTTTTVTPTPTPTGTQTPTTTPITTTTTVTPTPTPTGTQTPTTTPITTTTTVTPTPTPTGTQTPTTTPITTTTTVTPTPTPTGTQTPTTTPITTTTTVTPTPTPTGTQTPTTTPITTTTTVTPTPTPTGTQTPTTTPITTTTTVTPTPTPTGTQTPTTTPITTTTTVTPTPTPTGTQTPTTTPITTTTTVTPTPTPTGTQTPTTTPITTTTTVTPTPTPTGTQTPTTTPITTTTTVTPTPTPTGTQTPTTTPITTTTTVTPTPTPTGTQTPTTTPITTTTTVTPTPTPTGTQTPTTTPITTTTTVTPTPTPTGTQTPTTTPITTTTTVTPTPTPTGTQTGPPTHTSTAPIAELTTSNPPPESSTPQTSRSTSSPLTESTTLLSTLPPAIEMTSTAPPSTPTAPTTTSGGHTLSPPPSTTTSPPGTPTRGTTTGSSSAPTPSTVQTTTTSAWTPTPTPLSTPSIIRTTGLRPYPSSVLICCVLNDTYYAPGEEVYNGTYGDTCYFVNCSLSCTLEFYNWSCPSTPSPTPTPSKSTPTPSKPSSTPSKPTPGTKPPECPDFDPPRQENETWWLCDCFMATCKYNNTVEIVKVECEPPPMPTCSNGLQPVRVEDPDGCCWHWECDCYCTGWGDPHYVTFDGLYYSYQGNCTYVLVEEISPSVDNFGVYIDNYHCDPNDKVSCPRTLIVRHETQEVLIKTVHMMPMQVQVQVNRQAVALPYKKYGLEVYQSGINYVVDIPELGVLVSYNGLSFSVRLPYHRFGNNTKGQCGTCTNTTSDDCILPSGEIVSNCEAAADQWLVNDPSKPHCPHSSSTTKRPAVTVPGGGKTTPHKDCTPSPLCQLIKDSLFAQCHALVPPQHYYDACVFDSCFMPGSSLECASLQAYAALCAQQNICLDWRNHTHGACLVECPSHREYQACGPAEEPTCKSSSSQQNNTVLVEGCFCPEGTMNYAPGFDVCVKTCGCVGPDNVPREFGEHFEFDCKNCVCLEGGSGIICQPKRCSQKPVTHCVEDGTYLATEVNPADTCCNITVCKCNTSLCKEKPSVCPLGFEVKSKMVPGRCCPFYWCESKGVCVHGNAEYQPGSPVYSSKCQDCVCTDKVDNNTLLNVIACTHVPCNTSCSPGFELMEAPGECCKKCEQTHCIIKRPDNQHVILKPGDFKSDPKNNCTFFSCVKIHNQLISSVSNITCPNFDASICIPGSITFMPNGCCKTCTPRNETRVPCSTVPVTTEVSYAGCTKTVLMNHCSGSCGTFVMYSAKAQALDHSCSCCKEEKTSQREVVLSCPNGGSLTHTYTHIESCQCQDTVCGLPTGTSRRARRSPRHLGSG

SEQ ID NO: 20 - protein, 609 aa, Homo sapiens [sequence omitted]

SEQ ID NO: 21 - protein, 698 aa, Homo sapiens
MRLAVGALLVCAVLGLCLAVPDKTVRWCAVSEHEATKCQSFRDHMKSVIPSDGPSVACVKKASYLDCIRAIAANEADAVTLDAGLVYDAYLAPNNLKPVVAEFYGSKEDPQTFYYAVAVVKKDSGFQMNQLRGKKSCHTGLGRSAGWNIPIGLLYCDLPEPRKPLEKAVANFFSGSCAPCADGTDFPQLCQLCPGCGCSTLNQYFGYSGAFKCLKDGAGDVAFVKHSTIFENLANKADRDQYELLCLDNTRKPVDEYKDCHLAQVPSHTVVARSMGGKEDLIWELLNQAQEHFGKDKSKEFQLFSSPHGKDLLFKDSAHGFLKVPPRMDAKMYLGYEYVTAIRNLREGTCPEAPTDECKPVKWCALSHHERLKCDEWSVNSVGKIECVSAETTEDCIAKIMNGEADAMSLDGGFVYIAGKCGLVPVLAENYNKSDNCEDTPEAGYFAVAVVKKSASDLTWDNLKGKKSCHTAVGRTAGWNIPMGLLYNKINHCRFDEFFSEGCAPGSKKDSSLCKLCMGSGLNLCEPNNKEGYYGYTGAFRCLVEKGDVAFVKHQTVPQNTGGKNPDPWAKNLNEKDYELLCLDGTRKPVEEYANCHLARAPNHAVVTRKDKEACVHKILRQQQHLFGSNVTDCSGNFCLFRSETKDLLFRDDTVCLAKLHDRNTYEKYLGEEYVKAVGNLRKCSTSSLLEACTFRRP

SEQ ID NO: 22 - protein, 1663 aa, Homo sapiens
MGPTSGPSLLLLLLTHLPLALGSPMYSIITPNILRLESEETMVLEAHDAQGDVPVTVTVHDFPGKKLVLSSEKTVLTPATNHMGNVTFTIPANREFKSEKGRNKFVTVQATFGTQVVEKVVLVSLQSGYLFIQTDKTIYTPGSTVLYRIFTVNHKLLPVGRTVMVNIENPEGIPVKQDSLSSQNQLGVLPLSWDIPELVNMGQWKIRAYYENSPQQVFSTEFEVKEYVLPSFEVIVEPTEKFYYIYNEKGLEVTITARFLYGKKVEGTAFVIFGIQDGEQRISLPESLKRIPIEDGSGEVVLSRKVLLDGVQNPRAEDLVGKSLYVSATVILHSGSDMVQAERSGIPIVTSPYQIHFTKTPKYFKPGMPFDLMVFVTNPDGSPAYRVPVAVQGEDTVQSLTQGDGVAKLSINTHPSQKPLSITVRTKKQELSEAEQATRTMQALPYSTVGNSNNYLHLSVLRTELRPGETLNVNFLLRMDRAHEAKIRYYTYLIMNKGRLLKAGRQVREPGQDLVVLPLSITTDFIPSFRLVAYYTLIGASGQREVVADSVWVDVKDSCVGSLVVKSGQSEDRQPVPGQQMTLKIEGDHGARVVLVAVDKGVFVLNKKNKLTQSKIWDVVEKADIGCTPGSGKDYAGVFSDAGLTFTSSSGQQTAQRAELQCPQPAARRRRSVQLTEKRMDKVGKYPKELRKCCEDGMRENPMRFSCQRRTRFISLGEACKKVFLDCCNYITELRRQHARASHLGLARSNLDEDIIAEENIVSRSEFPESWLWNVEDLKEPPKNGISTKLMNIFLKDSITTWEILAVSMSDKKGICVADPFEVTVMQDFFIDLRLPYSVVRNEQVEIRAVLYNYRQNQELKVRVELLHNPAFCSLATTKRRHQQTVTIPPKSSLSVPYVIVPLKTGLQEVEVKAAVYHHFISDGVRKSLKVVPEGIRMNKTVAVRTLDPERLGREGVQKEDIPPADLSDQVPDTESETRILLQGTPVAQMTEDAVDAERLKHLIVTPSGCGEQNMIGMTPTVIAVHYLDETEQWEKFGLEKRQGALELIKKGYTQQLAFRQPSSAFAAFVKRAPSTWLTAYVVKVFSLAVNLIAIDSQVLCGAVKWLILEKQKPDGVFQEDAPVIHQEMIGGLRNNNEKDMALTAFVLISLQEAKDICEEQVNSLPGSITKAGDFLEANYMNLQRSYTVAIAGYALAQMGRLKGPLLNKFLTTAKDKNRWEDPGKQLYNVEATSYALLALLQLKDFDFVPPVVRWLNEQRYYGGGYGSTQATFMVFQALAQYQKDAPDHQELNLDVSLQLPSRSSKITHRIHWESASLLRSEETKENEGFTVTAEGKGQGTLSVVTMYHAKAKDQLTCNKFDLKVTIKPAPETEKRPQDAKNTMILEICTRYRGDQDATMSILDISMMTGFAPDTDDLKQLANGVDRYISKYELDKAFSDRNTLIIYLDKVSHSEDDCLAFKVHQYFNVELIQPGAVKVYAYYNLEESCTRFYHPEKEDGKLNKLCRDELCRCAEENCFIQKSDDKVTLEERLDKACEPGVDYVYKTRLVKVQLSNDFDEYIMAIEQTIKSGSDEVQVGQQRTFISPIKCREALKLEEKKHYLMWGLSSDFWGEKPNLSYIIGKDTWVEHWPEEDECQDEENQKQCQDLGAFTESMVVFGCPN

SEQ ID NO: 23 - protein, 418 aa, Homo sapiens
MPSSVSWGILLLAGLCCLVPVSLAEDPQGDAAQKTDTSHHDQDHPTFNKITPNLAEFAFSLYRQLAHQSNSTNIFFSPVSIATAFAMLSLGTKADTHDEILEGLNFNLTEIPEAQIHEGFQELLRTLNQPDSQLQLTTGNGLFLSEGLKLVDKFLEDVKKLYHSEAFTVNFGDTEEAKKQINDYVEKGTQGKIVDLVKELDRDTVFALVNYIFFKGKWERPFEVKDTEEEDFHVDQVTTVKVPMMKRLGMFNIQHCKKLSSWVLLMKYLGNATAIFFLPDEGKLQHLENELTHDIITKFLENEDRRSASLHLPKLSITGTYDLKSVLGQLGITKVFSNGADLSGVTEEAPLKLSKAVHKAVLTIDEKGTEAAGAMFLEAIPMSIPPEVKFNKPFVFLMIEQNTKSPLFMGKVVNPTQK

SEQ ID NO: 24 - protein, 1474 aa, Homo sapiens
MGKNKLLHPSLVLLLLVLLPTDASVSGKPQYMVLVPSLLHTETTEKGCVLLSYLNETVTVSASLESVRGNRSLFTDLEAENDVLHCVAFAVPKSSSNEEVMFLTVQVKGPTQEFKKRTTVMVKNEDSLVFVQTDKSIYKPGQTVKFRVVSMDENFHPLNELIPLVYIQDPKGNRIAQWQSFQLEGGLKQFSFPLSSEPFQGSYKVVVQKKSGGRTEHPFTVEEFVLPKFEVQVTVPKIITILEEEMNVSVCGLYTYGKPVPGHVTVSICRKYSDASDCHGEDSQAFCEKFSGQLNSHGCFYQQVKTKVFQLKRKEYEMKLHTEAQIQEEGTVVELTGRQSSEITRTITKLSFVKVDSHFRQGIPFFGQVRLVDGKGVPIPNKVIFIRGNEANYYSNATTDEHGLVQFSINTTNVMGTSLTVRVNYKDRSPCYGYQWVSEEHEEAHHTAYLVFSPSKSFVHLEPMSHELPCGHTQTVQAHYILNGGTLLGLKKLSFYYLIMAKGGIVRTGTHGLLVKQEDMKGHFSISIPVKSDIAPVARLLIYAVLPTGDVIGDSAKYDVENCLANKVDLSFSPSQSLPASHAHLRVTAAPQSVCALRAVDQSVLLMKPDAELSASSVYNLLPEKDLTGFPGPLNDQDDEDCINRHNVYINGITYTPVSSTNEKDMYSFLEDMGLKAFTNSKIRKPKMCPQLQQYEMHGPEGLRVGFYESDVMGRGHARLVHVEEPHTETVRKYFPETWIWDLVVVNSAGVAEVGVTVPDTITEWKAGAFCLSEDAGLGISSTASLRAFQPFFVELTMPYSVIRGEAFTLKATVLNYLPKCIRVSVQLEASPAFLAVPVEKEQAPHCICANGRQTVSWAVTPKSLGNVNFTVSAEALESQELCGTEVPSVPEHGRKDTVIKPLLVEPEGLEKETTFNSLLCPSGGEVSEELSLKLPPNVVEESARASVSVLGDILGSAMQNTQNLLQMPYGCGEQNMVLFAPNIYVLDYLNETQQLTPEIKSKAIGYLNTGYQRQLNYKHYDGSYSTFGERYGRNQGNTWLTAFVLKTFAQARAYIFIDEAHITQALIWLSQRQKDNGCFRSSGSLLNNAIKGGVEDEVTLSAYITIALLEIPLTVTHPVVRNALFCLESAWKTAQEGDHGSHVYTKALLAYAFALAGNQDKRKEVLKSLNEEAVKKDNSVHWERPQKPKAPVGHFYEPQAPSAEVEMTSYVLLAYLTAQPAPTSEDLTSATNIVKWITKQQNAQGGFSSTQDTVVALHALSKYGAATFTRTGKAAQVTIQSSGTFSSKFQVDNNNRLLLQQVSLPELPGEYSMKVTGEGCVYLQTSLKYNILPEKEEFPFALGVQTLPQTCDEPKAHTSFQISLSVSYTGSRSASNMAIVDVKMVSGFIPLKPTVKMLERSNHVSRTEVSSNHVLIYLDKVSNQTLSLFFTVLQDVPVRDLKPAIVKVYDYYETDEFAIAEYNAPCSKDLGNA

SEQ ID NO: 25 - protein, 267 aa, Homo sapiens
MKAAVLTLAVLFLTGSQARHFWQQDEPPQSPWDRVKDLATVYVDVLKDSGRDYVSQFEGSALGKQLNLKLLDNWDSVTSTFSKLREQLGPVTQEFWDNLEKETEGLRQEMSKDLEEVKAKVQPYLDDFQKKWQEEMELYRQKVEPLRAELQEGARQKLHELQEKLSPLGEEMRDRARAHVDALRTHLAPYSDELRQRLAARLEALKENGGARLAEYHAKATEHLSTLSEKAKPALEDLRQGLLPVLESFKVSFLSALEEYTKKLNTQ

SEQ ID NO: 26 - protein, 493 aa, Homo sapiens
MLWSWSEERGGAARLSGRKMKRVLVLLLAVAFGHALERGRDYEKNKVCKEFSHLGKEDFTSLSLVLYSRKFPSGTFEQVSQLVKEVVSLTEACCAEGADPDCYDTRTSALSAKSCESNSPFPVHPGTAECCTKEGLERKLCMAALKHQPQEFPTYVEPTNDEICEAFRKDPKEYANQFMWEYSTNYGQAPLSLLVSYTKSYLSMVGSCCTSASPTVCFLKERLQLKHLSLLTTLSNRVCSQYAAYGEKKSRLSNLIKLAQKVPTADLEDVLPLAEDITNILSKCCESASEDCMAKELPEHTVKLCDNLSTKNSKFEDCCQEKTAMDVFVCTYFMPAAQLPELPDVELPTNKDVCDPGNTKVMDKYTFELSRRTHLPEVFLSKVLEPTLKSLGECCDVEDSTTCFNAKGPLLKKELSSFIDKGQELCADYSENTFTEYKKKLAERLKAKLPDATPTELAKLVNKHSDFASNCCSINSPPLYCDSEIDAELKNIL

SEQ ID NO: 27 - protein, 4563 aa, Homo sapiens
MDPPRPALLALLALPALLLLLLAGARAEEEMLENVSLVCPKDATRFKHLRKYTYNYEAESSSGVPGTADSRSATRINCKVELEVPQLCSFILKTSQCTLKEVYGFNPEGKALLKKTKNSEEFAAAMSRYELKLAIPEGKQVFLYPEKDEPTYILNIKRGIISALLVPPETEEAKQVLFLDTVYGNCSTHFTVKTRKGNVATEISTERDLGQCDRFKPIRTGISPLALIKGMTRPLSTLISSSQSCQYTLDAKRKHVAEAICKEQHLFLPFSYKNKYGMVAQVTQTLKLEDTPKINSRFFGEGTKKMGLAFESTKSTSPPKQAEAVLKTLQELKKLTISEQNIQRANLFNKLVTELRGLSDEAVTSLLPQLIEVSSPITLQALVQCGQPQCSTHILQWLKRVHANPLLIDVVTYLVALIPEPSAQQLREIFNMARDQRSRATLYALSHAVNNYHKTNPTGTQELLDIANYLMEQIQDDCTGDEDYTYLILRVIGNMGQTMEQLTPELKSSILKCVQSTKPSLMIQKAAIQALRKMEPKDKDQEVLLQTFLDDASPGDKRLAAYLMLMRSPSQADINKIVQILPWEQNEQVKNFVASHIANILNSEELDIQDLKKLVKEALKESQLPTVMDFRKFSRNYQLYKSVSLPSLDPASAKIEGNLIFDPNNYLPKESMLKTTLTAFGFASADLIEIGLEGKGFEPTLEALFGKQGFFPDSVNKALYWVNGQVPDGVSKVLVDHFGYTKDDKHEQDMVNGIMLSVEKLIKDLKSKEVPEARAYLRILGEELGFASLHDLQLLGKLLLMGARTLQGIPQMIGEVIRKGSKNDFFLHYIFMENAFELPTGAGLQLQISSSGVIAPGAKAGVKLEVANMQAELVAKPSVSVEFVTNMGIIIPDFARSGVQMNTNFFHESGLEAHVALKAGKLKFIIPSPKRPVKLLSGGNTLHLVSTTKTEVIPPLIENRQSWSVCKQVFPGLNYCTSGAYSNASSTDSASYYPLTGDTRLELELRPTGEIEQYSVSATYELQREDRALVDTLKFVTQAEGAKQTEATMTFKYNRQSMTLSSEVQIPDFDVDLGTILRVNDESTEGKTSYRLTLDIQNKKITEVALMGHLSCDTKEERKIKGVISIPRLQAEARSEILAHWSPAKLLLQMDSSATAYGSTVSKRVAWHYDEEKIEFEWNTGTNVDTKKMTSNFPVDLSDYPKSLHMYANRLLDHRVPQTDMTFRHVGSKLIVAMSSWLQKASGSLPYTQTLQDHLNSLKEFNLQNMGLPDFHIPENLFLKSDGRVKYTLNKNSLKIEIPLPFGGKSSRDLKMLETVRTPALHFKSVGFHLPSREFQVPTFTIPKLYQLQVPLLGVLDLSTNVYSNLYNWSASYSGGNTSTDHFSLRARYHMKADSVVDLLSYNVQGSGETTYDHKNTFTLSCDGSLRHKFLDSNIKFSHVEKLGNNPVSKGLLIFDASSSWGPQMSASVHLDSKKKQHLFVKEVKIDGQFRVSSFYAKGTYGLSCQRDPNTGRLNGESNLRFNSSYLQGTNQITGRYEDGTLSLTSTSDLQSGIIKNTASLKYENYELTLKSDTNGKYKNFATSNKMDMTFSKQNALLRSEYQADYESLRFFSLLSGSLNSHGLELNADILGTDKINSGAHKATLRIGQDGISTSATTNLKCSLLVLENELNAELGLSGASMKLTTNGRFREHNAKFSLDGKAALTELSLGSAYQAMILGVDSKNIFNFKVSQEGLKLSNDMMGSYAEMKFDHTNSLNIAGLSLDFSSKLDNIYSSDKFYKQTVNLQLQPYSLVTTLNSDLKYNALDLTNNGKLRLEPLKLHVAGNLKGAYQNNEIKHIYAISSAALSASYKADTVAKVQGVEFSHRLNTDIAGLASAIDMSTNYNSDSLHFSNVFRSVMAPFTMTIDAHTNGNGKLALWGEHTGQLYSKFLLKAEPLAFTFSHDYKGSTSHHLVSRKSISAALEHKVSALLTPAEQTGTWKLKTQFNNNEYSQDLDAYNTKDKIGVELTGRTLADLTLLDSPIKVPLLLSEPINIIDALEMRDAVEKPQEFTIVAFVKYDKNQDVHSINLPFFETLQEYFERNRQTIIVVLENVQRNLKHINIDQFVRKYRAALGKLPQQANDYLNSFNWERQVSHAKEKLTALTKKYRITENDIQIALDDAKINFNEKLSQLQTYMIQFDQYIKDSYDLHDLKIAIANIIDEIIEKLKSLDEHYHIRVNLVKTIHDLHLFIENIDFNKSGSSTASWIQNVDTKYQIRIQIQEKLQQLKRHIQNIDIQHLAGKLKQHIEAIDVRVLLDQLGTTISFERINDVLEHVKHFVINLIGDFEVAEKINAFRAKVHELIERYEVDQQIQVLMDKLVELAHQYKLKETIQKLSNVLQQVKIKDYFEKLVGFIDDAVKKLNELSFKTFIEDVNKFLDMLIKKLKSFDYHQFVDETNDKIREVTQRLNGEIQALELPQKAEALKLFLEETKATVAVYLESLQDTKITLIINWLQEALSSASLAHMKAKFRETLEDTRDRMYQMDIQQELQRYLSLVGQVYSTLVTYISDWWTLAAKNLTDFAEQYSIQDWAKRMKALVEQGFTVPEIKTILGTMPAFEVSLQALQKATFQTPDFIVPLTDLRIPSVQINFKDLKNIKIPSRFSTPEFTILNTFHIPSFTIDFVEMKVKIIRTIDQMLNSELQWPVPDIYLRDLKVEDIPLARITLPDFRLPEIAIPEFIIPTLNLNDFQVPDLHIPEFQLPHISHTIEVPTFGKLYSILKIQSPLFTLDANADIGNGTTSANEAGIAASITAKGESKLEVLNFDFQANAQLSNPKINPLALKESVKFSSKYLRTEHGSEMLFFGNAIEGKSNTVASLHTEKNTLELSNGVIVKINNQLTLDSNTKYFHKLNIPKLDFSSQADLRNEIKTLLKAGHIAWTSSGKGSWKWACPRFSDEGTHESQISFTIEGPLTSFGLSNKINSKHLRVNQNLVYESGSLNFSKLEIQSQVDSQHVGHSVLTAKGMALFGEGKAEFTGRHDAHLNGKVIGTLKNSLFFSAQPFEITASTNNEGNLKVRFPLRLTGKIDFLNNYALFLSPSAQQASWQVSARFNQYKYNQNFSAGNNENIMEAHVGINGEANLDFLNIPLTIPEMRLPYTIITTPPLKDFSLWEKTGLKEFLKTTKQSFDLSVKAQYKKNKHRHSITNPLAVLCEFISQSIKSFDRHFEKNRNNALDFVTKSYNETKIKFDKYKAEKSHDELPRTFQIPGYTVPVVNVEVSPFTIEMSAFGYVFPKAVSMPSFSILGSDVRVPSYTLILPSLELPVLHVPRNLKLSLPDFKELCTISHIFIPAMGNITYDFSFKSSVITLNTNAELFNQSDIVAHLLSSSSSVIDALQYKLEGTTRLTRKRGLKLATALSLSNKFVEGSHNSTVSLTTKNMEVSVATTTKAQIPILRMNFKQELNGNTKSKPTVSSSMEFKYDFNSSMLYSTAKGAVDHKLSLESLTSYFSIESSTKGDVKGSVLSREYSGTIASEANTYLNSKSTRSSVKLQGTSKIDDIWNLEVKENFAGEATLQRIYSLWEHSTKNHLQLEGLFFTNGEHTSKATLELSPWQMSALVQVHASQPSSFHDFPDLGQEVALNANTKNQKIRWKNEVRIHSGSFQSQVELSNDQEKAHLDIAGSLEGHLRFLKNIILPVYDKSLWDFLKLDVTTSIGRRQHLRVSTAFVYTKNPNGYSFSIPVKVLADKFIIPGLKLNDLNSVLVMPTFHVPFTDLQVPSCKLDFREIQIYKKLRTSSFALNLPTLPEVKFPEVDVLTKYSQPEDSLIPFFEITVPESQLTVSQFTLPKSVSDGIAALDLNAVANKIADFELPTIIVPEQTIEIPSIKFSVPAGIVIPSFQALTARFEVDSPVYNATWSASLKNKADYVETVLDSTCSSTVQFLEYELNVLGTHKIEDGTLASKTKGTFAHRDFSAEYEEDGKYEGLQEWEGKAHLNIKSPAFTDLHLRYQKDKKGISTSAASPAVGTVGMDMDEDDDFSKWNFYYSPQSSPDKKLTIFKTELRVRESDEETQIKVNWEEEAASGLLTSLKDNVPKATGVLYDYVNKYHWEHTGLTLREVSSKLRRNLQNNAEWVYQGAIRQIDDIDVRFQKAASGTTGTYQEWKDKAQNLYQELLTQEGQASFQGLKDNVFDGLVRVTQEFHMKVKHLIDSLIDFLNFPRFQFPGKPGIYTREELCTMFIREVGTVLSQVYSKVHNGSEILFSYFQDLVITLPFELRKHKLIDVISMYRELLKDLSKEAQEVFKAIQSLKTTEVLRNLQDLLQFIFQLIEDNIKQLKEMKFTYLINYIQDEINTIFSDYIPYVFKLLKENLCLNLHKFNEFIQNELQEASQELQQIHQYIMALREEYFDPSIVGWTVKYYELEEKIVSLIKNLLVALKDFHSEYIVSASNFTSQLSSQVEQFLHRNIQEYLSILTDPDGKGKEKIAELSATAQEIIKSQAIATKKIISDYHQQFRYKLQDFSDQLSDYYEKFIAESKRLIDLSIQNYHTFLIYITELLKKLQSTTVMNPYMKLAPGELTIIL

SEQ ID NO: 28 - protein, 406 aa, Homo sapiens
MSALGAVIALLLWGQLFAVDSGNDVTDIADDGCPKPPEIAHGYVEHSVRYQCKNYYKLRTEGDGVYTLNDKKQWINKAVGDKLPECEADDGCPKPPEIAHGYVEHSVRYQCKNYYKLRTEGDGVYTLNNEKQWINKAVGDKLPECEAVCGKPKNPANPVQRILGGHLDAKGSFPWQAKMVSHHNLTTGATLINEQWLLTTAKNLFLNHSENATAKDIAPTLTLYVGKKQLVEIEKVVLHPNYSQVDIGLIKLKQKVSVNERVMPICLPSKDYAEVGRVGYVSGWGRNANFKFTDHLKYVMLPVADQDQCIRHYEGSTVPEKKTPKSPVGVQPILNEHTFCAGMSKYQEDTCYGDAGSAFAVHDLEEDTWYATGILSFDKSCAVAEYGVYVKVTSIQDWVQKTIAEN

SEQ ID NO: 29 - protein, 1231 aa, Homo sapiens
MRLLAKIICLMLWAICVAEDCNELPPRRNTEILTGSWSDQTYPEGTQAIYKCRPGYRSLGNVIMVCRKGEWVALNPLRKCQKRPCGHPGDTPFGTFTLTGGNVFEYGVKAVYTCNEGYQLLGEINYRECDTDGWTNDIPICEVVKCLPVTAPENGKIVSSAMEPDREYHFGQAVRFVCNSGYKIEGDEEMHCSDDGFWSKEKPKCVEISCKSPDVINGSPISQKIIYKENERFQYKCNMGYEYSERGDAVCTESGWRPLPSCEEKSCDNPYIPNGDYSPLRIKHRTGDEITYQCRNGFYPATRGNTAKCTSTGWIPAPRCTLKPCDYPDIKHGGLYHENMRRPYFPVAVGKYYSYYCDEHFETPSGSYWDHIHCTQDGWSPAVPCLRKCYFPYLENGYNQNHGRKFVQGKSIDVACHPGYALPKAQTTVTCMENGWSPTPRCIRVKTCSKSSIDIENGFISESQYTYALKEKAKYQCKLGYVTADGETSGSITCGKDGWSAQPTCIKSCDIPVFMNARTKNDFTWFKLNDTLDYECHDGYESNTGSTTGSIVCGYNGWSDLPICYERECELPKIDVHLVPDRKKDQYKVGEVLKFSCKPGFTIVGPNSVQCYHFGLSPDLPICKEQVQSCGPPPELLNGNVKEKTKEEYGHSEVVEYYCNPRFLMKGPNKIQCVDGEWTTLPVCIVEESTCGDIPELEHGWAQLSSPPYYYGDSVEFNCSESFTMIGHRSITCIHGVWTQLPQCVAIDKLKKCKSSNLIILEEHLKNKKEFDHNSNIRYRCRGKEGWIHTVCINGRWDPEVNCSMAQIQLCPPPPQIPNSHNMTTTLNYRDGEKVSVLCQENYLIQEGEEITCKDGRWQSIPLCVEKIPCSQPPQIEHGTINSSRSSQESYAHGTKLSYTCEGGFRISEENETTCYMGKWSSPPQCEGLPCKSPPEISHGVVAHMSDSYQYGEEVTYKCFEGFGIDGPAIAKCLGEKWSHPPSCIKTDCLSLPSFENAIPMGEKKDVYKAGEQVTYTCATYYKMDGASNVTCINSRWTGRPTCRDTSCVNPPTVQNAYIVSRQMSKYPSGERVRYQCRSPYEMFGDEEVMCLNGNWTEPPQCKDSTGKCGPPPPIDNGDITSFPLSVYAPASSVEYQCQNLYQLEGNKRITCRNGQWSEPPKCLHPCVISREIMENYNIALRWTAKQKLYSRTGESVEFVCKRGYRLSSRSHTLRTTCWDGKLEYPTCAKR

SEQ ID NO: 30 - protein, 1065 aa, Homo sapiens
MKILILGIFLFLCSTPAWAKEKHYYIGIIETTWDYASDHGEKKLISVDTEHSNIYLQNGPDRIGRLYKKALYLQYTDETFRTTIEKPVWLGFLGPIIKAETGDKVYVHLKNLASRPYTFHSHGITYYKEHEGAIYPDNTTDFQRADDKVYPGEQYTYMLLATEEQSPGEGDGNCVTRIYHSHIDAPKDIASGLIGPLIICKKDSLDKEKEKHIDREFVVMFSVVDENFSWYLEDNIKTYCSEPEKVDKDNEDFQESNRMYSVNGYTFGSLPGLSMCAEDRVKWYLFGMGNEVDVHAAFFHGQALTNKNYRIDTINLFPATLFDAYMVAQNPGEWMLSCQNLNHLKAGLQAFFQVQECNKSSSKDNIRGKHVRHYYIAAEEIIWNYAPSGIDIFTKENLTAPGSDSAVFFEQGTTRIGGSYKKLVYREYTDASFTNRKERGPEEEHLGILGPVIWAEVGDTIRVTFHNKGAYPLSIEPIGVRFNKNNEGTYYSPNYNPQSRSVPPSASHVAPTETFTYEWTVPKEVGPTNADPVCLAKMYYSAVDPTKDIFTGLIGPMKICKKGSLHANGRQKDVDKEFYLFPTVFDENESLLLEDNIRMFTTAPDQVDKEDEDFQESNKMHSMNGFMYGNQPGLTMCKGDSVVWYLFSAGNEADVHGIYFSGNTYLWRGERRDTANLFPQTSLTLHMWPDTEGTFNVECLTTDHYTGGMKQKYTVNQCRRQSEDSTFYLGERTYYIAAVEVEWDYSPQREWEKELHHLQEQNVSNAFLDKGEFYIGSKYKKVVYRQYTDSTFRVPVERKAEEEHLGILGPQLHADVGDKVKIIFKNMATRPYSIHAHGVQTESSTVTPTLPGETLTYVWKIPERSGAGTEDSACIPWAYYSTVDQVKDLYSGLIGPLIVCRRPYLKVFNPRRKLEFALLFLVFDENESWYLDDNIKTYSDHPEKVNKDDEEFIESNKMHAINGRMFGNLQGLTMHVGDEVNWYLMGMGNEIDLHTVHFHGHSFQYKHRGVYSSDVFDIFPGTYQTLEMFPRTPGIWLLHCHVTDHIHAGMETTYTVLQNEDTKSG

SEQ ID NO: 31 - protein, 462 aa, Homo sapiens
MARVLGAPVALGLWSLCWSLAIATPLPPTSAHGNVAEGETKPDPDVTERCSDGWSFDATTLDDNGTMLFFKGEFVWKSHKWDRELISERWKNFPSPVDAAFRQGHNSVFLIKGDKVWVYPPEKKEKGYPKLLQDEFPGIPSPLDAAVECHRGECQAEGVLFFQGDREWFWDLATGTMKERSWPAVGNCSSALRWLGRYYCFQGNQFLRFDPVRGEVPPRYPRDVRDYFMPCPGRGHGHRNGTGHGNSTHHGPEYMRCSPHLVLSALTSDNHGATYAFSGTHYWRLDTSRDGWHSWPIAHQWPQGPSAVDAAFSWEEKLYLVQGTQVYVFLTKGGYTLVSGYPKRLEKEVGTPHGIILDSVDAAFICPGSSRLHIMAGRRLWWLDLKSGAQATWTELPWPHEKVDGALCMEKSLGPNSCSANGPGLYLIHGPNLYCYSDVEKLNAAKALPQPQNVTSLLGCTH

SEQ ID NO: 32 - protein, 967 aa, Homo sapiens
MAKGFYISKSLGILGILLGVAAVCTIIALSVVYSQEKNKNANSSPVASTTPSASATTNPASATTLDQSKAWNRYRLPNTLKPDSYRVTLRPYLTPNDRGLYVFKGSSTVRFTCKEATDVIIIHSKKLNYTLSQGHRVVLRGVGGSQPPDIDKTELVEPTEYLVVHLKGSLVKDSQYEMDSEFEGELADDLAGFYRSEYMEGNVRKVVATTQMQAADARKSFPCFDEPAMKAEFNITLIHPKDLTALSNMLPKGPSTPLPEDPNWNVTEFHTTPKMSTYLLAFIVSEFDYVEKQASNGVLIRIWARPSAIAAGHGDYALNVTGPILNFFAGHYDTPYPLPKSDQIGLPDFNAGAMENWGLVTYRENSLLFDPLSSSSSNKERVVTVIAHELAHQWFGNLVTIEWWNDLWLNEGFASYVEYLGADYAEPTWNLKDLMVLNDVYRVMAVDALASSHPLSTPASEINTPAQISELFDAISYSKGASVLRMLSSFLSEDVFKQGLASYLHTFAYQNTIYLNLWDHLQEAVNNRSIQLPTTVRDIMNRWTLQMGFPVITVDTSTGTLSQEHFLLDPDSNVTRPSEFNYVWIVPITSIRDGRQQQDYWLIDVRAQNDLFSTSGNEWVLLNLNVTGYYRVNYDEENWRKIQTQLQRDHSAIPVINRAQIINDAFNLASAHKVPVTLALNNTLFLIEERQYMPWEAALSSLSYFKLMFDRSEVYGPMKNYLKKQVTPLFIHFRNNTNNWREIPENLMDQYSEVNAISTACSNGVPECEEMVSGLFKQWMENPNNNPIHPNLRSTVYCNAIAQGGEEEWDFAWEQFRNATLVNEADKLRAALACSKELWILNRYLSYTLNPDLIRKQDATSTIISITNNVIGQGLVWDFVQSNWKKLFNDYGGGSFSFSNLIQAVTRRFSTEYELQQLEQFKKDNEETGFGSGTRALEQALEKTKANIKWVKENKEVVLQWFTENSK

SEQ ID NO: 33 - protein, 914 aa, Homo sapiens
MGPFKSSVFILILHLLEGALSNSLIQLNNNGYEGIVVAIDPNVPEDETLIQQIKDMVTQASLYLFEATGKRFYFKNVAILIPETWKTKADYVRPKLETYKNADVLVAESTPPGNDEPYTEQMGNCGEKGERIHLTPDFIAGKKLAEYGPQGRAFVHEWAHLRWGVFDEYNNDEKFYLSNGRIQAVRCSAGITGTNVVKKCQGGSCYTKRCTFNKVTGLYEKGCEFVLQSRQTEKASIMFAQHVDSIVEFCTEQNHNKEAPNKQNQKCNLRSTWEVIRDSEDFKKTTPMTTQPPNPTFSLLQIGQRIVCLVLDKSGSMATGNRLNRLNQAGQLFLLQTVELGSWVGMVTFDSAAHVQNELIQINSGSDRDTLAKRLPAAASGGTSICSGLRSAFTVIRKKYPTDGSEIVLLTDGEDNTISGCFNEVKQSGAIIHTVALGPSAAQELEELSKMTGGLQTYASDQVQNNGLIDAFGALSSGNGAVSQRSIQLESKGLTLQNSQWMNGTVIVDSTVGKDTLFLITWTMQPPQILLWDPSGQKQGGFVVDKNTKMAYLQIPGIAKVGTWKYSLQASSQTLTLTVTSRASNATLPPITVTSKTNKDTSKFPSPLVVYANIRQGASPILRASVTALIESVNGKTVTLELLDNGAGADATKDDGVYSRYFTTYDTNGRYSVKVRALGGVNAARRRVIPQQSGALYIPGWIENDEIQWNPPRPEINKDDVQHKQVCFSRTSSGGSFVASDVPNAPIPDLFPPGQITDLKAEIHGGSLINLTWTAPGDDYDHGTAHKYIIRISTSILDLRDKFNESLQVNTTALIPKEANSEEVFLFKPENITFENGTDLFIAIQAVDKVDLKSEISNIARVSLFIPPQTPPETPSPDETSAPCPNIHINSTIPGIHILKIMWKWIGELQLSIA

SEQ ID NO: 34 - protein, 528 aa, Homo sapiens
MQGPWVLLLLGLRLQLSLGVIPAEEENPAFWNRQAAEALDAAKKLQPIQKVAKNLILFLGDGLGVPTVTATRILKGQKNGKLGPETPLAMDRFPYLALSKTYNVDRQVPDSAATATAYLCGVKANFQTIGLSAAARFNQCNTTRGNEVISVMNRAKQAGKSVGVVTTTRVQHASPAGTYAHTVNRNWYSDADMPASARQEGCQDIATQLISNMDIDVILGGGRKYMFPMGTPDPEYPADASQNGIRLDGKNLVQEWLAKHQGAWYVWNRTELMQASLDQSVTHLMGLFEPGDTKYEIHRDPTLDPSLMEMTEAALRLLSRNPRGFYLFVEGGRIDHGHHEGVAYQALTEAVMFDDAIERAGQLTSEEDTLTLVTADHSHVFSFGGYTLRGSSIFGLAPSKAQDSKAYTSILYGNGPGYVFNSGVRPDVNESESGSPDYQQQAAVPLSSETHGGEDVAVFARGPQAHLVHGVQEQSFVAHVMAFAACLEPYTACDLAPPACTTDAAHPVAASLPLLAGTLLLLGASAAP

SEQ ID NO: 35 - protein, 1019 aa, Homo sapiens
MGSKRGISSRHHSLSSYEIMFAALFAILVVLCAGLIAVSCLTIKESQRGAALGQSHEARATFKITSGVTYNPNLQDKLSVDFKVLAFDLQQMIDEIFLSSNLKNEYKNSRVLQFENGSIIVVFDLFFAQWVSDENVKEELIQGLEANKSSQLVTFHIDLNSVDILDKLTTTSHLATPGNVSIECLPGSSPCTDALTCIKADLFCDGEVNCPDGSDEDNKMCATVCDGRFLLTGSSGSFQATHYPKPSETSVVCQWIIRVNQGLSIKLSFDDFNTYYTDILDIYEGVGSSKILRASIWETNPGTIRIFSNQVTATFLIESDESDYVGFNATYTAFNSSELNNYEKINCNFEDGFCFWVQDLNDDNEWERIQGSTFSPFTGPNFDHTFGNASGFYISTPTGPGGRQERVGLLSLPLDPTLEPACLSFWYHMYGENVHKLSINISNDQNMEKTVFQKEGNYGDNWNYGQVTLNETVKFKVAFNAFKNKILSDIALDDISLTYGICNGSLYPEPTLVPTPPPELPTDCGGPFELWEPNTTFSSTNFPNSYPNLAFCVWILNAQKGKNIQLHFQEFDLENINDVVEIRDGEEADSLLLAVYTGPGPVKDVFSTTNRMTVLLITNDVLARGGFKANFTTGYHLGIPEPCKADHFQCKNGECVPLVNLCDGHLHCEDGSDEADCVRFFNGTTNNNGLVRFRIQSIWHTACAENWTTQISNDVCQLLGLGSGNSSKPIFSTDGGPFVKLNTAPDGHLILTPSQQCLQDSLIRLQCNHKSCGKKLAAQDITPKIVGGSNAKEGAWPWVVGLYYGGRLLCGASLVSSDWLVSAAHCVYGRNLEPSKWTAILGLHMKSNLTSPQTVPRLIDEIVINPHYNRRRKDNDIAMMHLEFKVNYTDYIQPICLPEENQVFPPGRNCSIAGWGTVVYQGTTANILQEADVPLLSNERCQQQMPEYNITENMICAGYEEGGIDSCQGDSGGPLMCQENNRWFLAGVTSFGYKCALPNRPGVYARVSRFTEWIQSFLH

SEQ ID NO: 36 - protein, 766 aa, Homo sapiens
MKTPWKVLLGLLGAAALVTIITVPVVLLNKGTDDATADSRKTYTLTDYLKNTYRLKLYSLRWISDHEYLYKQENNILVFNAEYGNSSVFLENSTFDEFGHSINDYSISPDGQFILLEYNYVKQWRHSYTASYDIYDLNKRQLITEERIPNNTQWVTWSPVGHKLAYVWNNDIYVKIEPNLPSYRITWTGKEDIIYNGITDWVYEEEVFSAYSALWWSPNGTFLAYAQFNDTEVPLIEYSFYSDESLQYPKTVRVPYPKAGAVNPTVKFFVVNTDSLSSVTNATSIQITAPASMLIGDHYLCDVTWATQERISLQWLRRIQNYSVMDICDYDESSGRWNCLVARQHIEMSTTGWVGRFRPSEPHFTLDGNSFYKIISNEEGYRHICYFQIDKKDCTFITKGTWEVIGIEALTSDYLYYISNEYKGMPGGRNLYKIQLSDYTKVTCLSCELNPERCQYYSVSFSKEAKYYQLRCSGPGLPLYTLHSSVNDKGLRVLEDNSALDKMLQNVQMPSKKLDFIILNETKFWYQMILPPHFDKSKKYPLLLDVYAGPCSQKADTVFRLNWATYLASTENIIVASFDGRGSGYQGDKIMHAINRRLGTFEVEDQIEAARQFSKMGFVDNKRIAIWGWSYGGYVTSMVLGSGSGVFKCGIAVAPVSRWEYYDSVYTERYMGLPTPEDNLDHYRNSTVMSRAENFKQVEYLLIHGTADDNVHFQQSAQISKALVDVGVDFQAMWYTDEDHGIASSTAHQHIYTHMSHFIKQCFSLP

SEQ ID NO: 37 - protein, 701 aa, Homo sapiens
MDLWNLSWFLFLDALLVISGLATPENFDVDGGMDQDIFDINEGLGLDLFEGDIRLDRAQIRNSIIGEKYRWPHTIPYVLEDSLEMNAKGVILNAFERYRLKTCIDFKPWAGETNYISVFKGSGCWSSVGNRRVGKQELSIGANCDRIATVQHEFLHALGFWHEQSRSDRDDYVRIMWDRILSGREHNFNTYSDDISDSLNVPYDYTSVMHYSKTAFQNGTEPTIVTRISDFEDVIGQRMDFSDSDLLKLNQLYNCSSSLSFMDSCSFELENVCGMIQSSGDNADWQRVSQVPRGPESDHSNMGQCQGSGFFMHFDSSSVNVGATAVLESRTLYPKRGFQCLQFYLYNSGSESDQLNIYIREYSADNVDGNLTLVEEIKEIPTGSWQLYHVTLKVTKKFRVVFEGRKGSGASLGGLSIDDINLSETRCPHHIWHIRNFTQFIGSPNGTLYSPPFYSSKGYAFQIYLNLAHVTNAGIYFHLISGANDDQLQWPCPWQQATMTLLDQNPDIRQRMSNQRSITTDPFMTTDNGNYFWDRPSKVGTVALFSNGTQFRRGGGYGTSAFITHERLKSRDFIKGDDVYILLTVEDISHLNSTQIQLTPAPSVQDLCSKTTCKNDGVCTVRDGKAECRCQSGEDWWYMGERCEKRGSTRDTIVIAVSSTVAVFALMLIITLVSVYCTRKKYRERMSSNRPNLTPQNQHAF

SEQ ID NO: 38 - protein, 746 aa, Homo sapiens
MAWIRSTCILFFTLLFAHIAAVPIKYLPEENVHDADFGEQKDISEINLAAGLDLFQGDILLQKSRNGLRDPNTRWTFPIPYILADNLGLNAKGAILYAFEMFRLKSCVDFKPYEGESSYIIFQQFDGCWSEVGDQHVGQNISIGQGCAYKAIIEHEILHALGFYHEQSRTDRDDYVNIWWDQILSGYQHNFDTYDDSLITDLNTPYDYESLMHYQPFSFNKNASVPTITAKIPEFNSIIGQRLDFSAIDLERLNRMYNCTTTHTLLDHCTFEKANICGMIQGTRDDTDWAHQDSAQAGEVDHTLLGQCTGAGYFMQFSTSSGSAEEAALLESRILYPKRKQQCLQFFYKMTGSPSDRLVVWVRRDDSTGNVRKLVKVQTFQGDDDHNWKIAHVVLKEEQKFRYLFQGTKGDPQNSTGGIYLDDITLTETPCPTGVWTVRNFSQVLENTSKGDKLQSPRFYNSEGYGFGVTLYPNSRESSGYLRLAFHVCSGENDAILEWPVENRQVIITILDQEPDVRNRMSSSMVFTTSKSHTSPAINDTVIWDRPSRVGTYHTDCNCFRSIDLGWSGFISHQMLKRRSFLKNDDLIIFVDFEDITHLSQTEVPTKGKRLSPQGLILQGQEQQVSEEGSGKAMLEEALPVSLSQGQPSRQKRSVENTGPLEDHNWPQYFRDPCDPNPCQNDGICVNVKGMASCRCISGHAFFYTGERCQAVQVHGSVLGMVIGGTAGVIFLTFSIIAILSQRPRK

SEQ ID NO: 39 - protein, 1827 aa, Homo sapiens
MARKKFSGLEISLIVLFVIVTIIAIALIVVLATKTPAVDEISDSTSTPATTRVTTNPSDSGKCPNVLNDPVNVRINCIPEQFPTEGICAQRGCCWRPWNDSLIPWCFFVDNHGYNVQDMTTTSIGVEAKLNRIPSPTLFGNDINSVLFTTQNQTPNRFRFKITDPNNRRYEVPHQYVKEFTGPTVSDTLYDVKVAQNPFSIQVIRKSNGKTLFDTSIGPLVYSDQYLQISTRLPSDYIYGIGEQVHKRFRHDLSWKTWPIFTRDQLPGDNNNNLYGHQTFFMCIEDTSGKSFGVFLMNSNAMEIFIQPTPIVTYRVTGGILDFYILLGDTPEQVVQQYQQLVGLPAMPAYWNLGFQLSRWNYKSLDVVKEVVRRNREAGIPFDTQVTDIDYMEDKKDFTYDQVAFNGLPQFVQDLHDHGQKYVIILDPAISIGRRANGTTYATYERGNTQHVWINESDGSTPIIGEVWPGLTVYPDFTNPNCIDWWANECSIFHQEVQYDGLWIDMNEVSSFIQGSTKGCNVNKLNYPPFTPDILDKLMYSKTICMDAVQNWGKQYDVHSLYGYSMAIATEQAVQKVFPNKRSFILTRSTFAGSGRHAAHWLGDNTASWEQMEWSITGMLEFSLFGIPLVGADICGFVAETTEELCRRWMQLGAFYPFSRNHNSDGYEHQDPAFFGQNSLLVKSSRQYLTIRYTLLPFLYTLFYKAHVFGETVARPVLHEFYEDTNSWIEDTEFLWGPALLITPVLKQGADTVSAYIPDAIWYDYESGAKRPWRKQRVDMYLPADKIGLHLRGGYIIPIQEPDVTTTASRKNPLGLIVALGENNTAKGDFFWDDGETKDTIQNGNYILYTFSVSNNTLDIVCTHSSYQEGTTLAFQTVKILGLTDSVTEVRVAENNQPMNAHSNFTYDASNQVLLIADLKLNLGRNFSVQWNQIFSENERFNCYPDADLATEQKCTQRGCVWRTGSSLSKAPECYFPRQDNSYSVNSARYSSMGITADLQLNTANARIKLPSDPISTLRVEVKYHKNDMLQFKIYDPQKKRYEVPVPLNIPTTPISTYEDRLYDVEIKENPFGIQIRRRSSGRVIWDSWLPGFAFNDQFIQISTRLPSEYIYGFGEVEHTAFKRDLNWNTWGMFTRDQPPGYKLNSYGFHPYYMALEEEGNAHGVFLLNSNAMDVTFQPTPALTYRTVGGILDFYMFLGPTPEVATKQYHEVIGHPVMPAYWALGFQLCRYGYANTSEVRELYDAMVAANIPYDVQYTDIDYMERQLDFTIGEAFQDLPQFVDKIRGEGMRYIIILDPAISGNETKTYPAFERGQQNDVFVKWPNTNDICWAKVWPDLPNITIDKTLTEDEAVNASRAHVAFPDFFRTSTAEWWAREIVDFYNEKMKFDGLWIDMNEPSSFVNGTTTNQCRNDELNYPPYFPELTKRTDGLHFRTICMEAEQILSDGTSVLHYDVHNLYGWSQMKPTHDALQKTTGKRGIVISRSTYPTSGRWGGHWLGDNYARWDNMDKSIIGMMEFSLFGMSYTGADICGFFNNSEYHLCTRWMQLGAFYPYSRNHNIANTRRQDPASWNETFAEMSRNILNIRYTLLPYFYTQMHEIHANGGTVIRPLLHEFFDEKPTWDIFKQFLWGPAFMVTPVLEPYVQTVNAYVPNARWFDYHTGKDIGVRGQFQTFNASYDTINLHVRGGHILPCQEPAQNTFYSRQKHMKLIVAADDNQMAQGSLFWDDGESIDTYERDLYLSVQFNLNQTTLTSTILKRGYINKSETRLGSLHVWGKGTTPVNAVTLTYNGNKNSLPFNEDTTNMILRIDLTTHNVTLEEPIEINWS

SEQ ID NO: 40 - protein, 1857 aa, Homo sapiens
MARKKLKKFTTLEIVLSVLLLVLFIISIVLIVLLAKESLKSTAPDPGTTGTPDPGTTGTPDPGTTGTTHARTTGPPDPGTTGTTPVSAECPVVNELERINCIPDQPPTKATCDQRGCCWNPQGAVSVPWCYYSKNHSYHVEGNLVNTNAGFTARLKNLPSSPVFGSNVDNVLLTAEYQTSNRFHFKLTDQTNNRFEVPHEHVQSFSGNAAASLTYQVEISRQPFSIKVTRRSNNRVLFDSSIGPLLFADQFLQLSTRLPSTNVYGLGEHVHQQYRHDMNWKTWPIFNRDTTPNGNGTNLYGAQTFFLCLEDASGLSFGVFLMNSNAMEVVLQPAPAITYRTIGGILDFYVFLGNTPEQVVQEYLELIGRPALPSYWALGFHLSRYEYGTLDNMREVVERNRAAQLPYDVQHADIDYMDERRDFTYDSVDFKGFPEFVNELHNNGQKLVIIVDPAISNNSSSSKPYGPYDRGSDMKIWVNSSDGVTPLIGEVWPGQTVFPDYTNPNCAVWWTKEFELFHNQVEFDGIWIDMNEVSNFVDGSVSGCSTNNLNNPPFTPRILDGYLFCKTLCMDAVQHWGKQYDIHNLYGYSMAVATAEAAKTVFPNKRSFILTRSTFAGSGKFAAHWLGDNTATWDDLRWSIPGVLEFNLFGIPMVGPDICGFALDTPEELCRRWMQLGAFYPFSRNHNGQGYKDQDPASFGADSLLLNSSRHYLNIRYTLLPYLYTLFFRAHSRGDTVARPLLHEFYEDNSTWDVHQQFLWGPGLLITPVLDEGAEKVMAYVPDAVWYDYETGSQVRWRKQKVEMELPGDKIGLHLRGGYIFPTQQPNTTTLASRKNPLGLIIALDENKEAKGELFWDNGETKDTVANKVYLLCEFSVTQNRLEVNISQSTYKDPNNLAFNEIKILGTEEPSNVTVKHNGVPSQTSPTVTYDSNLKVAIITDIDLLLGEAYTVEWSIKIRDEEKIDCYPDENGASAENCTARGCIWEASNSSGVPFCYFVNDLYSVSDVQYNSHGATADISLKSSVYANAFPSTPVNPLRLDVTYHKNEMLQFKIYDPNKNRYEVPVPLNIPSMPSSTPEGQLYDVLIKKNPFGIEIRRKSTGTIIWDSQLLGFTFSDMFIRISTRLPSKYLYGFGETEHRSYRRDLEWHTWGMFSRDQPPGYKKNSYGVHPYYMGLEEDGSAHGVLLLNSNAMDVTFQPLPALTYRTTGGVLDFYVFLGPTPELVTQQYTELIGRPVMVPYWSLGFQLCRYGYQNDSEIASLYDEMVAAQIPYDVQYSDIDYMERQLDFTLSPKFAGFPALINRMKADGMRVILILDPAISGNETQPYPAFTRGVEDDVFIKYPNDGDIVWGKVWPDFPDVVVNGSLDWDSQVELYRAYVAFPDFFRNSTAKWWKREIEELYNNPQNPERSLKFDGMWIDMNEPSSFVNGAVSPGCRDASLNHPPYMPHLESRDRGLSSKTLCMESQQILPDGSLVQHYNVHNLYGWSQTRPTYEAVQEVTGQRGVVITRSTFPSSGRWAGHWLGDNTAAWDQLKKSIIGMMEFSLFGISYTGADICGFFQDAEYEMCVRWMQLGAFYPFSRNHNTIGTRRQDPVSWDVAFVNISRTVLQTRYTLLPYLYTLMHKAHTEGVTVVRPLLHEFVSDQVTWDIDSQFLLGPAFLVSPVLERNARNVTAYFPRARWYDYYTGVDINARGEWKTLPAPLDHINLHVRGGYILPWQEPALNTHLSRQKFMGFKIALDDEGTAGGWLFWDDGQSIDTYGKGLYYLASFSASQNTMQSHIIFNNYITGTNPLKLGYIEIWGVGSVPVTSVSISVSGMVITPSFNNDPTTQVLSIDVTDRNISLHNFTSLTWISTL

SEQ ID NO: 41 - protein, 335 aa, Homo sapiens
MGKVKVGVNGFGRIGRLVTRAAFNSGKVDIVAINDPFIDLNYMVYMFQYDSTHGKFHGTVKAENGKLVINGNPITIFQERDPSKIKWGDAGAEYVVESTGVFTTMEKAGAHLQGGAKRVIISAPSADAPMFVMGVNHEKYDNSLKIISNASCTTNCLAPLAKVIHDNFGIVEGLMTTVHAITATQKTVDGPSGKLWRDGRGALQNIIPASTGAAKAVGKVIPELNGKLTGMAFRVPTANVSVVDLTCRLEKPAKYDDIKKVVKQASEGPLKGILGYTEHQVVSSDFNSDTHSSTFDAGAGIALNDHFVKLISWYDNEFGYSNRVVDLMAHMASKE

SEQ ID NO: 42 - protein, 417 aa, Homo sapiens
MAGPFSRLLSARPGLRLLALAGAGSLAAGFLLRPEPVRAASERRRLYPPSAEYPDLRKHNNCMASHLTPAVYARLCDKTTPTGWTLDQCIQTGVDNPGHPFIKTVGMVAGDEETYEVFADLFDPVIQERHNGYDPRTMKHTTDLDASKIRSGYFDERYVLSSRVRTGRSIRGLSLPPACTRAERREVERVVVDALSGLKGDLAGRYYRLSEMTEAEQQQLIDDHFLFDKPVSPLLTAAGMARDWPDARGIWHNNEKSFLIWVNEEDHTRVISMEKGGNMKRVFERFCRGLKEVERLIQERGWEFMWNERLGYILTCPSNLGTGLRAGVHIKLPLLSKDSRFPKILENLRLQKRGTGGVDTAATGGVFDISNLDRLGKSEVELVQLVIDGVNYLIDCERRLERGQDIRIPTPVIHTKH

SEQ ID NO: 43 - protein, 2039 aa, Homo sapiens
MFNLMKKDKDKDGGRKEKKEKKEKKERMSAAELRSLEEMSLRRGFFNLNRSSKRESKTRLEISNPIPIKVASGSDLHLTDIDSDSNRGSVILDSGHLSTASSSDDLKGEEGSFRGSVLQRAAKFGSLAKQNSQMIVKRFSFSQRSRDESASETSTPSEHSAAPSPQVEVRTLEGQLVQHPGPGIPRPGHRSRAPELVTKKFPVDLRLPPVVPLPPPTLRELELQRRPTGDFGFSLRRTTMLDRGPEGQACRRVVHFAEPGAGTKDLALGLVPGDRLVEINGHNVESKSRDEIVEMIRQSGDSVRLKVQPIPELSELSRSWLRSGEGPRREPSDAKTEEQIAAEEAWNETEKVWLVHRDGFSLASQLKSEELNLPEGKVRVKLDHDGAILDVDEDDVEKANAPSCDRLEDLASLVYLNESSVLHTLRQRYGASLLHTYAGPSLLVLGPRGAPAVYSEKVMHMFKGCRREDMAPHIYAVAQTAYRAMLMSRQDQSIILLGSSGSGKTTSCQHLVQYLATIAGISGNKVFSVEKWQALYTLLEAFGNSPTIINGNATRFSQILSLDFDQAGQVASASIQTMLLEKLRVARRPASEATFNVFYYLLACGDGTLRTELHLNHLAENNVFGIVPLAKPEEKQKAAQQFSKLQAAMKVLGISPDEQKACWFILAAIYHLGAAGATKEAAEAGRKQFARHEWAQKAAYLLGCSLEELSSAIFKHQHKGGTLQRSTSFRQGPEESGLGDGTGPKLSALECLEGMAAGLYSELFTLLVSLVNRALKSSQHSLCSMMIVDTPGFQNPEQGGSARGASFEELCHNYTQDRLQRLFHERTFVQELERYKEENIELAFDDLEPPTDDSVAAVDQASHQSLVRSLARTDEARGLLWLLEEEALVPGASEDTLLERLFSYYGPQEGDKKGQSPLLHSSKPHHFLLGHSHGTNWVEYNVTGWLNYTKQNPATQNAPRLLQDSQKKIISNLFLGRAGSATVLSGSIAGLEGGSQLALRRATSMRKTFTTGMAAVKKKSLCIQMKLQVDALIDTIKKSKLHFVHCFLPVAEGWAGEPRSASSRRVSSSSELDLPSGDHCEAGLLQLDVPLLRTQLRGSRLLDAMRMYRQGYPDHMVFSEFRRRFDVLAPHLTKKHGRNYIVVDERRAVEELLECLDLEKSSCCMGLSRVFFRAGTLARLEEQRDEQTSRNLTLFQAACRGYLARQHFKKRKIQDLAIRCVQKNIKKNKGVKDWPWWKLFTTVRPLIEVQLSEEQIRNKDEEIQQLRSKLEKAEKERNELRLNSDRLESRISELTSELTDERNTGESASQLLDAETAERLRAEKEMKELQTQYDALKKQMEVMEMEVMEARLIRAAEINGEVDDDDAGGEWRLKYERAVREVDFTKKRLQQEFEDKLEVEQQNKRQLERRLGDLQADSEESQRALQQLKKKCQRLTAELQDTKLHLEGQQVRNHELEKKQRRFDSELSQAHEEAQREKLQREKLQREKDMLLAEAFSLKQQLEEKDMDIAGFTQKVVSLEAELQDISSQESKDEASLAKVKKQLRDLEAKVKDQEEELDEQAGTIQMLEQAKLRLEMEMERMRQTHSKEMESRDEEVEEARQSCQKKLKQMEVQLEEEYEDKQKVLREKRELEGKLATLSDQVNRRDFESEKRLRKDLKRTKALLADAQLMLDHLKNSAPSKREIAQLKNQLEESEFTCAAAVKARKAMEVEIEDLHLQIDDIAKAKTALEEQLSRLQREKNEIQNRLEEDQEDMNELMKKHKAAVAQASRDLAQINDLQAQLEEANKEKQELQEKLQALQSQVEFLEQSMVDKSLVSRQEAKIRELETRLEFERTQVKRLESLASRLKENMEKLTEERDQRIAAENREKEQNKRLQRQLRDTKEEMGELARKEAEASRKKHELEMDLESLEAANQSLQADLKLAFKRIGDLQAAIEDEMESDENEDLINSEGDSDVDSELEDRVDGVKSWLSKNKGPSKAASDDGSLKSSSPTSYWKSLAPDRSDDEHDPLDNTSRPRYSHSYLSDSDTEAKLTETNA

SEQ ID NO: 44 - protein, 845 aa, Homo sapiens
MGSWALLWPPLLFTGLLVRPPGTMAQAQYCSVNKDIFEVEENTNVTEPLVDIHVPEGQEVTLGALSTPFAFRIQGNQLFLNVTPDYEEKSLLEAQLLCQSGGTLVTQLRVFVSVLDVNDNAPEFPFKTKEIRVEEDTKVNSTVIPETQLQAEDRDKDDILFYTLQEMTAGASDYFSLVSVNRPALRLDRPLDFYERPNMTFWLLVRDTPGENVEPSHTATATLVLNVVPADLRPPWFLPCTFSDGYVCIQAQYHGAVPTGHILPSPLVLRPGPIYAEDGDRGINQPIIYSIFRGNVNGTFIIHPDSGNLTVARSVPSPMTFLLLVKGQQADLARYSVTQVTVEAVAAAGSPPRFPQRLYRGTVARGAGAGVVVKDAAAPSQPLRIQAQDPEFSDLNSAITYRITNHSHFRMEGEVVLTTTTLAQAGAFYAEVEAHNTVTSGTATTVIEIQVSEQEPPSTDVPPSPEAGGTTGPWTSTTSEVPRPPEPSQGPSTTSSGGGTGPHPPSGTTLRPPTSSTPGGPPGAENSTSHQPATPGGDTAQTPKPGTSQPMPPGVGTSTSHQPATPSGGTAQTPEPGTSQPMPPSMGTSTSHQPATPGGGTAQTPEAGTSQPMPPGMGTSTSHQPTTPGGGTAQTPEPGTSQPMPLSKSTPSSGGGPSEDKRFSVVDMAALGGVLGALLLLALLGLAVLVHKHYGPRLKCCSGKAPEPQPQGFDNQAFLPDHKANWAPVPSPTHDPKPAEAPMPAEPAPPGPASPGGAPEPPAAARAGGSPTAVRSILTKERRPEGGYKAVWFGEDIGTEADVVVLNAPTLDVDGASDSGSGDEGEGAGRGGGPYDAPGGDDSYI

SEQ ID NO: 45 - protein, 1785 aa, Homo sapiens
MGISTVILEMCLLWGQVLSTGGWIPRTTDYASLIPSEVPLDPTVAEGSPFPSESTLESTVAEGSPISLESTLESTVAEGSLIPSESTLESTVAEGSDSGLALRLVNGDGRCQGRVEILYRGSWGTVCDDSWDTNDANVVCRQLGCGWAMSAPGNAWFGQGSGPIALDDVRCSGHESYLWSCPHNGWLSHNCGHGEDAGVICSAAQPQSTLRPESWPVRISPPVPTEGSESSLALRLVNGGDRCRGRVEVLYRGSWGTVCDDYWDTNDANVVCRQLGCGWAMSAPGNAQFGQGSGPIVLDDVRCSGHESYLWSCPHNGWLTHNCGHSEDAGVICSAPQSRPTPSPDTWPTSHASTAGPESSLALRLVNGGDRCQGRVEVLYRGSWGTVCDDSWDTSDANVVCRQLGCGWATSAPGNARFGQGSGPIVLDDVRCSGYESYLWSCPHNGWLSHNCQHSEDAGVICSAAHSWSTPSPDTLPTITLPASTVGSESSLALRLVNGGDRCQGRVEVLYQGSWGTVCDDSWDTNDANVVCRQLGCGWAMSAPGNARFGQGSGPIVLDDVRCSGHESYLWSCPHNGWLSHNCGHSEDAGVICSASQSRPTPSPDTWPTSHASTAGSESSLALRLVNGGDRCQGRVEVLYRGSWGTVCDDYWDTNDANVVCRQLGCGWAMSAPGNARFGQGSGPIVLDDVRCSGHESYLWSCPHNGWLSHNCGHHEDAGVICSASQSQPTPSPDTWPTSHASTAGSESSLALRLVNGGDRCQGRVEVLYRGSWGTVCDDYWDTNDANVVCRQLGCGWATSAPGNARFGQGSGPIVLDDVRCSGHESYLWSCPHNGWLSHNCGHHEDAGVICSASQSQPTPSPDTWPTSRASTAGSESTLALRLVNGGDRCRGRVEVLYQGSWGTVCDDYWDTNDANVVCRQLGCGWAMSAPGNAQFGQGSGPIVLDDVRCSGHESYLWSCPHNGWLSHNCGHHEDAGVICSAAQSQSTPRPDTWLTTNLPALTVGSESSLALRLVNGGDRCRGRVEVLYRGSWGTVCDDSWDTNDANVVCRQLGCGWAMSAPGNARFGQGSGPIVLDDVRCSGNESYLWSCPHKGWLTHNCGHHEDAGVICSATQINSTTTDWWHPTTTTTARPSSNCGGFLFYASGTFSSPSYPAYYPNNAKCVWEIEVNSGYRINLGFSNLKLEAHHNCSFDYVEIFDGSLNSSLLLGKICNDTRQIFTSSYNRMTIHFRSDISFQNTGFLAWYNSFPSDATLRLVNLNSSYGLCAGRVEIYHGGTWGTVCDDSWTIQEAEVVCRQLGCGRAVSALGNAYFGSGSGPITLDDVECSGTESTLWQCRNRGWFSHNCNHREDAGVICSGNHLSTPAPFLNITRPNTDYSCGGFLSQPSGDFSSPFYPGNYPNNAKCVWDIEVQNNYRVTVIFRDVQLEGGCNYDYIEVFDGPYRSSPLIARVCDGARGSFTSSSNFMSIRFISDHSITRRGFRAEYYSSPSNDSTNLLCLPNHMQASVSRSYLQSLGFSASDLVISTWNGYYECRPQITPNLVIFTIPYSGCGTFKQADNDTIDYSNFLTAAVSGGIIKRRTDLRIHVSCRMLQNTWVDTMYIANDTIHVANNTIQVEEVQYGNFDVNISFYTSSSFLYPVTSRPYYVDLNQDLYVQAEILHSDAVLTLFVDTCVASPYSNDFTSLTYDLIRSGCVRDDTYGPYSSPSLRIARFRFRAFHFLNRFPSVYLRCKMVVCRAYDPSSRCYRGCVLRSKRDVGSYQEKVDVVLGPIQLQTPPRREEEPR

SEQ ID NO: 46 - protein, 1310 aa, Homo sapiens
MAQLWLSCFLLPALVVSVAANVAPKFLANMTSVILPEDLPVGAQAFWLVAEDQDNDPLTYGMSGPNAYFFAVTPKTGEVKLASALDYETLYTFKVTISVSDPYIQVQREMLVIVEDRNDNAPVFQNTAFSTSINETLPVGSVVFSVLAVDKDMGSAGMVVYSIEKVIPSTGDSEHLFRILANGSIVLNGSLSYNNKSAFYQLELKACDLGGMYHNTFTIQCSLPVFLSISVVDQPDLDPQFVREFYSASVAEDAAKGTSVLTVEAVDGDKGINDPVIYSISYSTRPGWFDIGADGVIRVNGSLDREQLLEADEEVQLQVTATETHLNIYGQEAKVSIWVTVRVMDVNDHKPEFYNCSLPACTFTPEEAQVNFTGYVDEHASPRIPIDDLTMVVYDPDKGSNGTFLLSLGGPDAEAFSVSPERAVGSASVQVLVRVSALVDYERQTAMAVQVVATDSVSQNFSVAMVTIHLRDINDHRPTFPQSLYVLTVPEHSATGSVVTDSIHATDPDTGAWGQITYSLLPGNGADLFQVDPVSGTVTVRNGELLDRESQAVYYLTLQATDGGNLSSSTTLQIHLLDINDNAPVVSGSYNIFVQEEEGNVSVTIQAHDNDEPGTNNSRLLFNLLPGPYSHNFSLDPDTGLLRNLGPLDREAIDPALEGRIVLTVLVSDCGEPVLGTKVNVTITVEDINDNLPIFNQSSYNFTVKEEDPGVLVGVVKAWDADQTEANNRISFSLSGSGANYFMIRGLVLGAGWAEGYLRLPPDVSLDYETQPVFNLTVSAENPDPQGGETIVDVCVNVKDVNDNPPTLDVASLRGIRVAENGSQHGQVAVVVASDVDTSAQLEIQLVNILCTKAGVDVGSLCWGWFSVAANGSVYINQSKAIDYEACDLVTLVVRACDLATDPGFQAYSNNGSLLITIEDVNDNAPYFLPENKTFVIIPELVLPNREVASVRARDDDSGNNGVILFSILRVDFISKDGATIPFQGVFSIFTSSEADVFAGSIQPVTSLDSTLQGTYQVTVQARDRPSLGPFLEATTTLNLFTVDQSYRSRLQFSTPKEEVGANRQAINAALTQATRTTVYIVDIQDIDSAARARPHSYLDAYFVFPNGSALTLDELSVMIRNDQDSLTQLLQLGLVVLGSQESQESDLSKQLISVIIGLGVALLLVLVIMTMAFVCVRKSYNRKLQAMKAAKEARKTAAGVMPSAPAIPGTNMYNTERANPMLNLPNKDLGLEYLSPSNDLDSVSVNSLDDNSVDVDKNSQEIKEHRPPHTPPEPDPEPLSVVLLGRQAGASGQLEGPSYTNAGLDTTDL

SEQ ID NO: 47 - protein, 702 aa, Homo sapiens
MESPSAPPHRWCIPWQRLLLTASLLTFWNPPTTAKLTIESTPFNVAEGKEVLLLVHNLPQHLFGYSWYKGERVDGNRQIIGYVIGTQQATPGPAYSGREIIYPNASLLIQNIIQNDTGFYTLHVIKSDLVNEEATGQFRVYPELPKPSISSNNSKPVEDKDAVAFTCEPETQDATYLWWVNNQSLPVSPRLQLSNGNRTLTLFNVTRNDTASYKCETQNPVSARRSDSVILNVLYGPDAPTISPLNTSYRSGENLNLSCHAASNPPAQYSWFVNGTFQQSTQELFIPNITVNNSGSYTCQAHNSDTGLNRTTVTTITVYAEPPKPFITSNNSNPVEDEDAVALTCEPEIQNTTYLWWVNNQSLPVSPRLQLSNDNRTLTLLSVTRNDVGPYECGIQNKLSVDHSDPVILNVLYGPDDPTISPSYTYYRPGVNLSLSCHAASNPPAQYSWLIDGNIQQHTQELFISNITEKNSGLYTCQANNSASGHSRTTVKTITVSAELPKPSISSNNSKPVEDKDAVAFTCEPEAQNTTYLWWVNGQSLPVSPRLQLSNGNRTLTLFNVTRNDARAYVCGIQNSVSANRSDPVTLDVLYGPDTPIISPPDSSYLSGANLNLSCHSASNPSPQYSWRINGIPQQHTQVLFIAKITPNNNGTYACFVSNLATGRNNSIVKSITVSASGTSPGLSAGATVGIMIGVLVGVALI

SEQ ID NO: 48 - protein, 261 aa, Homo sapiens
MASPDWGYDDKNGPEQWSKLYPIANGNNQSPVDIKTSETKHDTSLKPISVSYNPATAKEIINVGHSFHVNFEDNDNRSVLKGGPFSDSYRLFQFHFHWGSTNEHGSEHTVDGVKYSAELHVAHWNSAKYSSLAEAASKADGLAVIGVLMKVGEANPKLQKVLDALQAIKTKGKRAPFTNFDPSTLLPSSLDFWTYPGSLTHPPLYESVTWIICKESISVSSEQLAQFRSLLSNVEGDNAVPMQHNNRPTQPLKGRTVRASF

SEQ ID NO: 49 - protein, 756 aa, Homo sapiens
MLTMGRLQLVVLGLTCCWAVASAAKLGAVYTEGGFVEGVNKKLGLLGDSVDIFKGIPFAAPTKALENPQPHPGWQGTLKAKNFKKRCLQATITQDSTYGDEDCLYLNIWVPQGRKQVSRDLPVMIWIYGGAFLMGSGHGANFLNNYLYDGEEIATRGNVIVVTFNYRVGPLGFLSTGDANLPGNYGLRDQHMAIAWVKRNIAAFGGDPNNITLFGESAGGASVSLQTLSPYNKGLIRRAISQSGVALSPWVIQKNPLFWAKKVAEKVGCPVGDAARMAQCLKVTDPRALTLAYKVPLAGLEYPMLHYVGFVPVIDGDFIPADPINLYANAADIDYIAGTNNMDGHIFASIDMPAINKGNKKVTEEDFYKLVSEFTITKGLRGAKTTFDVYTESWAQDPSQENKKKTVVDFETDVLFLVPTEIALAQHRANAKSAKTYAYLFSHPSRMPVYPKWVGADHADDIQYVFGKPFATPTGYRPQDRTVSKAMIAYWTNFAKTGDPNMGDSAVPTHWEPYTTENSGYLEITKKMGSSSMKRSLRTNFLRYWTLTYLALPTVTDQEATPVPPTGDSEATPVPPTGDSETAPVPPTGDSGAPPVPPTGDSGAPPVPPTGDSGAPPVPPTGDSGAPPVPPTGDSGAPPVPPTGDSGAPPVPPTGDSGAPPVPPTGDSGAPPVPPTGDAGPPPVPPTGDSGAPPVPPTGDSGAPPVTPTGDSETAPVPPTGDSGAPPVPPTGDSEAAPVPPTDDSKEAQMPAVIRF

SEQ ID NO: 50 - protein, 452 aa, Homo sapiens
GSASAPTLFPLVSCENSPSDTSSVAVGCLAQDFLPDSITLSWKYKNNSDISSTRGFPSVLRGGKYAATSQVLLPSKDVMQGTDEHVVCKVQHPNGNKEKNVPLPVIAELPPKVSVFVPPRDGFFGNPRKSKLICQATGFSPRQIQVSWLREGKQVGSGVTTDQVQAEAKESGPTTYKVTSTLTIKESDWLGQSMFTCRVDHRGLTFQQNASSMCVPDQDTAIRVFAIPPSFASIFLTKSTKLTCLVTDLTTYDSVTISWTRQNGEAVKTHTNISESHPNATFSAVGEASICEDDWNSGERFTCTVTHTDLPSPLKQTISRPKGVALHRPDVYLLPPAREQLNLRESATITCLVTGFSPADVFVQWMQRGQPLSPEKYVTSAPMPEPQAPGRYFAHSILTVSEEEWNTGETYTCVAHEALPNRVTERTVDKSTGKPTLYNVSLVMSDTAGTCY

SEQ ID NO: 51 - protein, 353 aa, Homo sapiens
ASPTSPKVFPLSLCSTQPDGNVVIACLVQGFFPQEPLSVTWSESGQGVTARNFPPSQDASGDLYTTSSQLTLPATQCLAGKSVTCHVKHYTNPSQDVTVPCPVPSTPPTPSPSTPPTPSPSCCHPRLSLHRPALEDLLLGSEANLTCTLTGLRDASGVTFTWTPSSGKSAVQGPPERDLCGCYSVSSVLPGCAEPWNHGKTFTCTAAYPESKTPLTATLSKSGNTFRPEVHLLPPPSEELALNELVTLTCLARGFSPKDVLVRWLQGSQELPREKYLTWASRQEPSQGTTTFAVTSILRVAAEDWKKGDTFSCMVGHEALPLAFTQKTIDRLAGKPTHVNVSVVMAEVDGTCY

SEQ ID NO: 52 - protein, 764 aa, Homo sapiens
MLLFVLTCLLAVFPAISTKSPIFGPEEVNSVEGNSVSITCYYPPTSVNRHTRKYWCRQGARGGCITLISSEGYVSSKYAGRANLTNFPENGTFVVNIAQLSQDDSGRYKCGLGINSRGLSFDVSLEVSQGPGLLNDTKVYTVDLGRTVTINCPFKTENAQKRKSLYKQIGLYPVLVIDSSGYVNPNYTGRIRLDIQGTGQLLFSVVINQLRLSDAGQYLCQAGDDSNSNKKNADLQVLKPEPELVYEDLRGSVTFHCALGPEVANVAKFLCRQSSGENCDVVVNTLGKRAPAFEGRILLNPQDKDGSFSVVITGLRKEDAGRYLCGAHSDGQLQEGSPIQAWQLFVNEESTIPRSPTVVKGVAGGSVAVLCPYNRKESKSIKYWCLWEGAQNGRCPLLVDSEGWVKAQYEGRLSLLEEPGNGTFTVILNQLTSRDAGFYWCLTNGDTLWRTTVEIKIIEGEPNLKVPGNVTAVLGETLKVPCHFPCKFSSYEKYWCKWNNTGCQALPSQDEGPSKAFVNCDENSRLVSLTLNLVTRADEGWYWCGVKQGHFYGETAAVYVAVEERKAAGSRDVSLAKADAAPDEKVLDSGFREIENKAIQDPRLFAEEKAVADTRDQADGSRASVDSGSSEEQGGSSRALVSTLVPLGLVLAVGAVAVGVARARHRKNVDRVSIRSYRTDISMSDFENSREFGANDNMGASSITQETSLGGKEEFVATTESTTETKEPKKAKRSSKEEAEMAYKDFLLQSSTVAAEAQDGPQEA

SEQ ID NO: 53 - protein, 340 aa, Homo sapiens
ASPTSPKVFPLSLDSTPQDGNVVVACLVQGFFPQEPLSVTWSESGQNVTARNFPPSQDASGDLYTTSSQLTLPATQCPDGKSVTCHVKHYTNPSQDVTVPCPVPPPPPCCHPRLSLHRPALEDLLLGSEANLTCTLTGLRDASGATFTWTPSSGKSAVQGPPERDLCGCYSVSSVLPGCAQPWNHGETFTCTAAHPELKTPLTANITKSGNTFRPEVHLLPPPSEELALNELVTLTCLARGFSPKDVLVRWLQGSQELPREKYLTWASRQEPSQGTTTFAVTSILRVAAEDWKKGDTFSCMVGHEALPLAFTQKTIDRMAGKPTHVNVSVVMAEVDGTCY

SEQ ID NO: 54 - protein, 1662 aa, Homo sapiens
MGISTVILEMCLLWGQVLSTGGWIPRTTDYASLIPSEVPLDTTVAEGSPFPSELTLESTVAEGSPISLESTLESTVAEGSLIPSESTLESTVAEGSDSGLALRLVNGDGRCQGRVEILYRGSWGTVCDDSWDTNDANVVCRQLGCGWAMSAPGNAWFGQGSGPIALDDVRCSGHESYLWSCPHNGWLSHNCGHGEDAGVICSAAQPQSTLRPESWPVRISPPVPTEGSESSLALRLVNGGDRCRGRVEVLYRGSWGTVCDDYWDTNDANVVCRQLGCGWAMSAPGNAQFGQGSGPIVLDDVRCSGHESYLWSCPHNGWLTHNCGHSEDAGVICSAPQSRPTPSPDTWPTSHASTAGSESSLALRLVNGGDRCQGRVEVLYRGSWGTVCDDSWDTSDANVVCRQLGCGWATSAPGNARFGQGSGPIVLDDVRCSGYESYLWSCPHNGWLSHNCQHSEDAGVICSAAHSWSTPSPGERDRTDTLPTITLPASTVGSESSLALRLVNGGDRCQGRVEVLYRGSWGTVCDDSWDTNDANVVCRQLGCGWAMLAPGNARFGQGSGPIVLDDVRCSGNESYLWSCPHNGWLSHNCGHSEDAGVICSAAQSRSTPRPDTWPTSHASTAGSESSLALRLVNGGDRCQGRVEVLYQGSWGTVCDDSWDTNDANVVCRQLGCGWAMSAPGNARFGQGSGPIVLDDVRCSGHESYLWSCPHNGWLSHNCGHSEDAGVICSASQSRPTPSPDTWPTSRASTAGSESTLALRLVNGGDRCRGRVEVLYQGSWGTVCDDYWDTNDANVVCRQLGCGWAMSAPGNAQFGQGSGPIVLDDVRCSGHESYLWSCPHNGWLSHNCGHHEDAGVICSAAQSQSTPRPDTWLTTNLPALTVGSESSLALRLVNGGDRCRGRVEVLYRGSWGTVCDDSWDTNDANVVCRQLGCGWAMSAPGNARFGQGSGPIVLDDVRCSGNESYLWSCPHKGWLTHNCGHHEDAGVICSATQINSTTTDWWHPTTTTTARPSSNCGGFLFYASGTFSSPSYPAYYPNNAKCVWEIEVNSGYRINLGFSNLKLEAHHNCSFDYVEIFDGSLNSSLLLGKICNDTRQIFTSSYNRMTIHFRSDISFQNTGFLAWYNSFPSDATLRLVNLNSSYGLCAGRVEIYHGGTWGTVCDDSWTIQEAEVVCRQLGCGRAVSALGNAYFGSGSGPITLDDVECSGTESTLWQCRNRGWFSHNCNHREDAGVICSGNHLSTPAPFLNITRPNTDYSCGGFLSQPSGDFSSPFYPGNYPNNAKCVWDIEVQNNYRVTVIFRDVQLEGGCNYDYIEVFDGPYRSSPLIARVCDGARGSFTSSSNFMSIRFISDHSITRRGFRAEYYSSPSNDSTNLLCLPNHMQASVSRSYLQSLGFSASDLVISTWNGYYECRPQITPNLVIFTIPYSGCGTFKQADNDTIDYSNFLTAAVSGGIIKRRTDLRIHVSCRMLQNTWVDTMYIANDTIHVANNTIQVEEVQYGNFDVNISFYTSSSFLYPVTSRPYYVDLNQDLYVQAEILHSDAVLTLFVDTCVASPYSNDFTSLTYDLIRSGCVRDDTYGPYSSPSLRIARFRFRAFHFLNRFPSVYLRCKMVVCRAYDPSSRCYRGCVLRSKRDVGSYQEKVDVVLGPIQLQTPPRREEEPR

SEQ ID NO: 55 - protein, 263 aa, Homo sapiens
MASLWLLSCFSLVGAAFGCGVPAIHPVLSGLSRIVNGEDAVPGSWPWQVSLQDKTGFHFCGGSLISEDWVVTAAHCGVRTSDVVVAGEFDQGSDEENIQVLKIAKVFKNPKFSILTVNNDITLLKLATPARFSQTVSAVCLPSADDDFPAGTLCATTGWGKTKYNANKTPDKLQQAALPLLSNAECKKSWGRRITDVMICAGASGVSSCMGDSGGPLVCQKDGAWTLVGIVSWGSDTCSTSSPGVYARVTKLIPWVQKILAAN

SEQ ID NO: 56 - protein, 511 aa, Homo sapiens; identical to SEQ ID NO: 5

SEQ ID NO: 57 - protein, 470 aa, Homo sapiens
MMLPPWTLGLLLLATVRGKEVCYGQLGCFSDEKPWAGTLQRPVKLLPWSPEDIDTRFLLYTNENPNNFQLITGTEPDTIEASNFQLDRKTRFIIHGFLDKAEDSWPSDMCKKMFEVEKVNCICVDWRHGSRAMYTQAVQNIRVVGAETAFLIQALSTQLGYSLEDVHVIGHSLGAHTAAEAGRRLGGRVGRITGLDPAGPCFQDEPEEVRLDPSDAVFVDVIHTDSSPIVPSLGFGMSQKVGHLDFFPNGGKEMPGCKKNVLSTITDIDGIWEGIGGFVSCNHLRSFEYYSSSVLNPDGFLGYPCASYDEFQESKCFPCPAEGCPKMGHYADQFKGKTSAVEQTFFLNTGESGNFTSWRYKVSVTLSGKEKVNGYIRIALYGSNENSKQYEIFKGSLKPDASHTCAIDVDFNVGKIQKVKFLWNKRGINLSEPKLGASQITVQSGEDGTEYNFCSSDTVEENVLQSLYPC

SEQ ID NO: 58 - protein, 269 aa, Homo sapiens
MIRTLLLSTLVAGALSCGVSTYAPDMSRMLGGEEARPNSWPWQVSLQYSSNGQWYHTCGGSLIANSWVLTAAHCISSSGIYRVMLGQHNLYVAESGSLAVSVSKIVVHKDWNSDQVSKGNDIALLKLANPVSLTDKIQLACLPPAGTILPNNYPCYVTGWGRLQTNGALPDDLKQGRLLVVDYATCSSSGWWGSTVKTNMICAGGDGVICTCNGDSGGPLNCQASDGRWEVHGIGSLTSVLGCNYYYKPSIFTRVSNYNDWINSVIANN

SEQ ID NO: 59 - protein, 338 aa, Homo sapiens [sequence omitted]

SEQ ID NO: 60 - protein, 805 aa, Homo sapiens [sequence omitted]

SEQ ID NO: 61 - protein, 4377 aa, Homo sapiens
MAHAASQLKKNRDLEINAEEEPEKKRKHRKRSRDRKKKSDANASYLRAARAGHLEKALDYIKNGVDINICNQNGLNALHLASKEGHVEVVSELLQREANVDAATKKGNTALHIASLAGQAEVVKVLVTNGANVNAQSQNGFTPLYMAAQENHLEVVKFLLDNGASQSLATEDGFTPLAVALQQGHDQVVSLLLENDTKGKVRLPALHIAARKDDTKAAALLLQNDNNADVESKSGFTPLHIAAHYGNINVATLLLNRAAAVDFTARNDITPLHVASKRGNANMVKLLLDRGAKIDAKTRDGLTPLHCGARSGHEQVVEMLLDRAAPILSKTKNGLSPLHMATQGDHLNCVQLLLQHNVPVDDVTNDYLTALHVAAHCGHYKVAKVLLDKKANPNAKALNGFTPLHIACKKNRIKVMELLLKHGASIQAVTESGLTPIHVAAFMGHVNIVSQLMHHGASPNTTNVRGETALHMAARSGQAEVVRYLVQDGAQVEAKAKDDQTPLHISARLGKADIVQQLLQQGASPNAATTSGYTPLHLSAREGHEDVAAFLLDHGASLSITTKKGFTPLHVAAKYGKLEVANLLLQKSASPDAAGKSGLTPLHVAAHYDNQKVALLLLDQGASPHAAAKNGYTPLHIAAKKNQMDIATTLLEYGADANAVTRQGIASVHLAAQEGHVDMVSLLLGRNANVNLSNKSGLTPLHLAAQEDRVNVAEVLVNQGAHVDAQTKMGYTPLHVGCHYGNIKIVNFLLQHSAKVNAKTKNGYTPLHQAAQQGHTHIINVLLQNNASPNELTVNGNTALGIARRLGYISVVDTLKIVTEETMTTTTVTEKHKMNVPETMNEVLDMSDDEVRKANAPEMLSDGEYISDVEEGEDAMTGDTDKYLGPQDLKELGDDSLPAEGYMGFSLGARSASLRSFSSDRSYTLNRSSYARDSMMIEELLVPSKEQHLTFTREFDSDSLRHYSWAADTLDNVNLVSSPIHSGFLVSFMVDARGGSMRGSRHHGMRIIIPPRKCTAPTRITCRLVKRHKLANPPPMVEGEGLASRLVEMGPAGAQFLGPVIVEIPHFGSMRGKERELIVLRSENGETWKEHQFDSKNEDLTELLNGMDEELDSPEELGKKRICRIITKDFPQYFAVVSRIKQESNQIGPEGGILSSTTVPLVQASFPEGALTKRIRVGLQAQPVPDEIVKKILGNKATFSPIVTVEPRRRKFHKPITMTIPVPPPSGEGVSNGYKGDTTPNLRLLCSITGGTSPAQWEDITGTTPLTFIKDCVSFTTNVSARFWLADCHQVLETVGLATQLYRELICVPYMAKFVVFAKMNDPVESSLRCFCMTDDKVDKTLEQQENFEEVARSKDIEVLEGKPIYVDCYGNLAPLTKGGQQLVFNFYSFKENRLPFSIKIRDTSQEPCGRLSFLKEPKTTKGLPQTAVCNLNITLPAHKKETESDQDDEIEKTDRRQSFASLALRKRYSYLTEPGMIERSTGATRSLPTTYSYKPFFSTRPYQSWTTAPITVPGPAKSGFTSLSSSSSNTPSASPLKSIWSVSTPSPIKSTLGASTTSSVKSISDVASPIRSFRTMSSPIKTVVSQSPYNIQVSSGTLARAPAVTEATPLKGLASNSTFSSRTSPVTTAGSLLERSSITMTPPASPKSNINMYSSSLPFKSIITSAAPLISSPLKSVVSPVKSAVDVISSAKITMASSLSSPVKQMPGHAEVALVNGSISPLKYPSSSTLINGCKATATLQEKISSATNSVSSVVSAATDTVEKVFSTTTAMPFSPLRSYVSAAPSAFQSLRTPSASALYTSLGSSISATTSSVTSSIITVPVYSVVNVLPEPALKKLPDSNSFTKSAAALLSPIKTLTTETHPQPHFSRTSSPVKSSLFLAPSALKLSTPSSLSSSQEILKDVAEMKEDLMRMTAILQTDVPEEKPFQPELPKEGRIDDEEPFKIVEKVKEDLVKVSEILKKDVCVDNKGSPKSPKSDKGHSPEDDWIEFSSEEIREARQQAAASQSPSLPERVQVKAKAASEKDYNLTKVIDYLTNDIGSSSLTNLKYKFEDAKKDGEERQKRVLKPAIALQEHKLKMPPASMRTSTSEKELCKMADSFFGTDTILESPDDFSQHDQDKSPLSDSGFETRSEKTPSAPQSAESTGPKPLFHEVPIPPVITETRTEVVHVIRSYDPSAGDVPQTQPEEPVSPKPSPTFMELEPKPTTSSIKEKVKAFQMKASSEEDDHNRVLSKGMRVKEETHITTTTRMVYHSPPGGEGASERIEETMSVHDIMKAFQSGRDPSKELAGLFEHKSAVSPDVHKSAAETSAQHAEKDNQMKPKLERIIEVHIEKGNQAEPTEVIIRETKKHPEKEMYVYQKDLSRGDINLKDFLPEKHDAFPCSEEQGQQEEEELTAEESLPSYLESSRVNTPVSQEEDSRPSSAQLISDDSYKTLKLLSQHSIEYHDDELSELRGESYRFAEKMLLSEKLDVSHSDTEESVTDHAGPPSSELQGSDKRSREKIATAPKKEILSKIYKDVSENGVGKVSKDEHFDKVTVLHYSGNVSSPKHAMWMRFTEDRLDRGREKLIYEDRVDRTVKEAEEKLTEVSQFFRDKTEKLNDELQSPEKKARPKNGKEYSSQSPTSSSPEKVLLTELLASNDEWVKARQHGPDGQGFPKAEEKAPSLPSSPEKMVLSQQTEDSKSTVEAKGSISQSKAPDGPQSGFQLKQSKLSSIRLKFEQGTHAKSKDMSQEDRKSDGQSRIPVKKIQESKLPVYQVFAREKQQKAIDLPDESVSVQKDFMVLKTKDEHAQSNEIVVNDSGSDNVKKQRTEMSSKAMPDSFSEQQAKDLACHITSDLATRGPWDKKVFRTWESSGATNNKSQKEKLSHVLVHDVRENHIGHPESKSVDQKNEFMSVTERERKLLTNGSLSEIKEMTVKSPSKKVLYREYVVKEGDHPGGLLDQPSRRSESSAVSHIPVRVADERRMLSSNIPDGFCEQSAFPKHELSQKLSQSSMSKETVETQHFNSIEDEKVTYSEISKVSKHQSYVGLCPPLEETETSPTKSPDSLEFSPGKESPSSDVFDHSPIDGLEKLAPLAQTEGGKEIKTLPVYVSFVQVGKQYEKEIQQGGVKKIISQECKTVQETRGTFYTTRQQKQPPSPQGSPEDDTLEQVSFLDSSGKSPLTPETPSSEEVSYEFTSKTPDSLIAYIPGKPSPIPEVSEESEEEEQAKSTSLKQTTVEETAVEREMPNDVSKDSNQRPKNNRVAYIEFPPPPPLDADQIESDKKHHYLPEKEVDMIEVNLQDEHDKYQLAEPVIRVQPPSPVPPGADVSDSSDDESIYQPVPVKKYTFKLKEVDDEQKEKPKASAEKASNQKELESNGSGKDNEFGLGLDSPQNEIAQNGNNDQSITECSIATTAEFSHDTDATEIDSLDGYDLQDEDDGLTESDSKLPIQAMEIKKDIWNTEGILKPADRSFSQSKLEVIEEEGKVGPDEDKPPSKSSSSEKTPDKTDQKSGAQFFTLEGRHPDRSVFPDTYFSYKVDEEFATPFKTVATKGLDFDPWSNNRGDDEVFDSKSREDETKPFGLAVEDRSPATTPDTTPARTPTDESTPTSEPNPFPFHEGKMFEMTRSGAIDMSKRDFVEERLQFFQIGEHTSEGKSGDQGEGDKSMVTATPQPQSGDTTVETNLERNVETPTVEPNPSIPTSGECQEGTSSSGSLEKSAAATNTSKVDPKLRTPIKMGISASTMTMKKEGPGEITDKIEAVMTSCQGLENETITMISNTANSQMGVRPHEKHDFQKDNFNNNNNLDSSTIQTDNIMSNIVLTEHSAPTCTTEKDNPVKVSSGKKTGVLQGHCVRDKQKVLGEQQKTKELIGIRQKSKLPIKATSPKDTFPPNHMSNTKASKMKQVSQSEKTKALTTSSCVDVKSRIPVKNTHRDNIIAVRKACATQKQGQPEKGKAKQLPSKLPVKVRSTCVTTTTTTATTTTTTTTTTTTSCTVKVRKSQLKEVCKHSIEYFKGISGETLKLVDRLSEEEKKMQSELSDEEESTSRNTSLSETSRGGQPSVTTKSARDKKTEAAPLKSKSEKAGSEKRSSRRTGPQSPCERTDIRMAIVADHLGLSWTELARELNFSVDEINQIRVENPNSLISQSFMLLKKWVTRDGKNATTDALTSVLTKINRIDIVTLLEGPIFDYGNISGTRSFADENNVFHDPVDGWQNETSSGNLESCAQARRVTGGLLDRLDDSPDQCRDSITSYLKGEAGKFEANGSHTEITPEAKTKSYFPESQNDVGKQSTKETLKPKIHGSGHVEEPASPLAAYQKSLEETSKLIIEETKPCVPVSMKKMSRTSPADGKPRLSLHEEEGSSGSEQKQGEGFKVKTKKEIRHVEKKSHS

SEQ ID NO: 62 - protein, 674 aa, Homo sapiens
MARAHWGCCPWLVLLCACAWGHTKPVDLGGQDVRNCSTNPPYLPVTVVNTTMSLTALRQQMQTQNLSAYIIPGTDAHMNEYIGQHDERRAWITGFTGSAGTAVVTMKKAAVWTDSRYWTQAERQMDCNWELHKEVGTTPIVTWLLTEIPAGGRVGFDPFLLSIDTWESYDLALQGSNRQLVSITTNLVDLVWGSERPPVPNQPIYALQEAFTGSTWQEKVSGVRSQMQKHQKVPTAVLLSALEETAWLFNLRASDIPYNPFFYSYTLLTDSSIRLFANKSRFSSETLSYLNSSCTGPMCVQIEDYSQVRDSIQAYSLGDVRIWIGTSYTMYGIYEMIPKEKLVTDTYSPVMMTKAVKNSKEQALLKASHVRDAVAVIRYLVWLEKNVPKGTVDEFSGAEIVDKFRGEEQFSSGPSFETISASGLNAALAHYSPTKELNRKLSSDEMYLLDSGGQYWDGTTDITRTVHWGTPSAFQKEAYTRVLIGNIDLSRLIFPAATSGRMVEAFARRALWDAGLNYGHGTGHGIGNFLCVHEWPVGFQSNNIAMAKGMFTSIEPGYYKDGEFGIRLEDVALVVEAKTKYPGSYLTFEVVSFVPYDRNLIDVSLLSPEHLQYLNRYYQTIREKVGPELQRRQLLEEFEWLQQHTEPLAARAPDTASWASVLVVSTLAILGWSV

SEQ ID NO: 63 - protein, 512 aa, Homo sapiens
MKAIIHLTLLALLSVNTATNQGNSADAVTTTETATSGPTVAAADTTETNFPETASTTANTPSFPTATSPAPPIISTHSSSTIPTPAPPIISTHSSSTIPIPTAADSESTTNVNSLATSDIITASSPNDGLITMVPSETQSNNEMSPTTEDNQSSGPPTGTALLETSTLNSTGPSNPCQDDPCADNSLCVKLHNTSFCLCLEGYYYNSSTCKKGKVFPGKISVTVSETFDPEEKHSMAYQDLHSEITSLFKDVFGTSVYGQTVILTVSTSLSPRSEMRADDKFVNVTIVTILAETTSDNEKTVTEKINKAIRSSSSNFLNYDLTLRCDYYGCNQTADDCLNGLACDCKSDLQRPNPQSPFCVASSLKCPDACNAQHKQCLIKKSGGAPECACVPGYQEDANGNCQKCAFGYSGLDCKDKFQLILTIVGTIAGIVILSMIIALIVTARSNNKTKHIEEENLIDEDFQNLKLRSTGFTNLGAEGSVFPKVRITASRDSQMQNPYSRHSSMPRPDY

SEQ ID NO: 64 - protein, 1306 aa, Homo sapiens
MGAASGRRGPGLLLPLPLLLLLPPQPALALDPGLQPGNFSADEAGAQLFAQSYNSSAEQVLFQSVAASWAHDTNITAENARRQEEAALLSQEFAEAWGQKAKELYEPIWQNFTDPQLRRIIGAVRTLGSANLPLAKRQQYNALLSNMSRIYSTAKVCLPNKTATCWSLDPDLTNILASSRSYAMLLFAWEGWHNAAGIPLKPLYEDFTALSNEAYKQDGFTDTGAYWRSWYNSPTFEDDLEHLYQQLEPLYLNLHAFVRRALHRRYGDRYINLRGPIPAHLLGDMWAQSWENIYDMVVPFPDKPNLDVTSTMLQQGWNATHMFRVAEEFFTSLELSPMPPEFWEGSMLEKPADGREVVCHASAWDFYNRKDFRIKQCTRVTMDQLSTVHHEMGHIQYYLQYKDLPVSLRRGANPGFHEAIGDVLALSVSTPEHLHKIGLLDRVTNDTESDINYLLKMALEKIAFLPFGYLVDQWRWGVFSGRTPPSRYNFDWWYLRTKYQGICPPVTRNETHFDAGAKFHVPNVTPYIRYFVSFVLQFQFHEALCKEAGYEGPLHQCDIYRSTKAGAKLRKVLQAGSSRPWQEVLKDMVGLDALDAQPLLKYFQPVTQWLQEQNQQNGEVLGWPEYQWHPPLPDNYPEGIDLVTDEAEASKFVEEYDRTSQVVWNEYAEANWNYNTNITTETSKILLQKNMQIANHTLKYGTQARKFDVNQLQNTTIKRIIKKVQDLERAALPAQELEEYNKILLDMETTYSVATVCHPNGSCLQLEPDLTNVMATSRKYEDLLWAWEGWRDKAGRAILQFYPKYVELINQAARLNGYVDAGDSWRSMYETPSLEQDLERLFQELQPLYLNLHAYVRRALHRHYGAQHINLEGPIPAHLLGNMWAQTWSNIYDLVVPFPSAPSMDTTEAMLKQGWTPRRMFKEADDFFTSLGLLPVPPEFWNKSMLEKPTDGREVVCHASAWDFYNGKDFRIKQCTTVNLEDLVVAHHEMGHIQYFMQYKDLPVALREGANPGFHEAIGDVLALSVSTPKHLHSLNLLSSEGGSDEHDINFLMKMALDKIAFIPFSYLVDQWRWRVFDGSITKENYNQEWWSLRLKYQGLCPPVPRTQGDFDPGAKFHIPSSVPYIRYFVSFIIQFQFHEALCQAAGHTGPLHKCDIYQSKEAGQRLATAMKLGFSRPWPEAMQLITGQPNMSASAMLSYFKPLLDWLRTENELHGEKLGWPQYNWTPNSARSEGPLPDSGRVSFLGLDLDAQQARVGQWLLLFLGIALLVATLGLSQRLFSIRHRSLHRHSHGPQFGSEVELRHS

SEQ ID NO: 65 - protein, 4834 aa, Homo sapiens
MPSESFCLAAQARLDSKWLKTDIQLAFTRDGLCGLWNEMVKDGEIVYTGTESTQNGELPPRKDDSVEPSGTKKEDLNDKEKKDEEETPAPIYRAKSILDSWVWGKQPDVNELKECLSVLVKEQQALAVQSATTTLSALRLKQRLVILERYFIALNRTVFQENVKVKWKSSGISLPPVDKKSSRPAGKGVEGLARVGSRAALSFAFAFLRRAWRSGEDADLCSELLQESLDALRALPEASLFDESTVSSVWLEVVERATRFLRSVVTGDVHGTPATKGPGSIPLQDQHLALAILLELAVQRGTLSQMLSAILLLLQLWDSGAQETDNERSAQGTSAPLLPLLQRFQSIICRKDAPHSEGDMHLLSGPLSPNESFLRYLTLPQDNELAIDLRQTAVVVMAHLDRLATPCMPPLCSSPTSHKGSLQEVIGWGLIGWKYYANVIGPIQCEGLANLGVTQIACAEKRFLILSRNGRVYTQAYNSDTLAPQLVQGLASRNIVKIAAHSDGHHYLALAATGEVYSWGCGDGGRLGHGDTVPLEEPKVISAFSGKQAGKHVVHIACGSTYSAAITAEGELYTWGRGNYGRLGHGSSEDEAIPMLVAGLKGLKVIDVACGSGDAQTLAVTENGQVWSWGDGDYGKLGRGGSDGCKTPKLIEKLQDLDVVKVRCGSQFSIALTKDGQVYSWGKGDNQRLGHGTEEHVRYPKLLEGLQGKKVIDVAAGSTHCLALTEDSEVHSWGSNDQCQHFDTLRVTKPEPAALPGLDTKHIVGIACGPAQSFAWSSCSEWSIGLRVPFVVDICSMTFEQLDLLLRQVSEGMDGSADWPPPQEKECVAVATLNLLRLQLHAAISHQVDPEFLGLGLGSILLNSLKQTVVTLASSAGVLSTVQSAAQAVLQSGWSVLLPTAEERARALSALLPCAVSGNEVNISPGRRFMIDLLVGSLMADGGLESALHAAITAEIQDIEAKKEAQKEKEIDEQEANASTFHRSRTPLDKDLINTGICESSGKQCLPLVQLIQQLLRNIASQTVARLKDVARRISSCLDFEQHSRERSASLDLLLRFQRLLISKLYPGESIGQTSDISSPELMGVGSLLKKYTALLCTHIGDILPVAASIASTSWRHFAEVAYIVEGDFTGVLLPELVVSIVLLLSKNAGLMQEAGAVPLLGGLLEHLDRFNHLAPGKERDDHEELAWPGIMESFFTGQNCRNNEEVTLIRKADLENHNKDGGFWTVIDGKVYDIKDFQTQSLTGNSILAQFAGEDPVVALEAALQFEDTRESMHAFCVGQYLEPDQEIVTIPDLGSLSSPLIDTERNLGLLLGLHASYLAMSTPLSPVEIECAKWLQSSIFSGGLQTSQIHYSYNEEKDEDHCSSPGGTPASKSRLCSHRRALGDHSQAFLQAIADNNIQDHNVKDFLCQIERYCRQCHLTTPIMFPPEHPVEEVGRLLLCCLLKHEDLGHVALSLVHAGALGIEQVKHRTLPKSVVDVCRVVYQAKCSLIKTHQEQGRSYKEVCAPVIERLRFLFNELRPAVCNDLSIMSKFKLLSSLPRWRRIAQKIIRERRKKRVPKKPESTDDEEKIGNEESDLEEACILPHSPINVDKRPIAIKSPKDKWQPLLSTVTGVHKYKWLKQNVQGLYPQSPLLSTIAEFALKEEPVDVEKMRKCLLKQLERAEVRLEGIDTILKLASKNFLLPSVQYAMFCGWQRLIPEGIDIGEPLTDCLKDVDLIPPFNRMLLEVTFGKLYAWAVQNIRNVLMDASAKFKELGIQPVPLQTITNENPSGPSLGTIPQARFLLVMLSMLTLQHGANNLDLLLNSGMLALTQTALRLIGPSCDNVEEDMNASAQGASATVLEETRKETAPVQLPVSGPELAAMMKIGTRVMRGVDWKWGDQDGPPPGLGRVIGELGEDGWIRVQWDTGSTNSYRMGKEGKYDLKLAELPAAAQPSAEDSDTEDDSEAEQTERNIHPTAMMFTSTINLLQTLCLSAGVHAEIMQSEATKTLCGLLRMLVESGTTDKTSSPNRLVYREQHRSWCTLGFVRSIALTPQVCGALSSPQWITLLMKVVEGHAPFTATSLQRQILAVHLLQAVLPSWDKTERARDMKCLVEKLFDFLGSLLTTCSSDVPLLRESTLRRRRVRPQASLTATHSSTLAEEVVALLRTLHSLTQWNGLINKYINSQLRSITHSFVGRPSEGAQLEDYFPDSENPEVGGLMAVLAVIGGIDGRLRLGGQVMHDEFGEGTVTRITPKGKITVQFSDMRTCRVCPLNQLKPLPAVAFNVNNLPFTEPMLSVWAQLVNLAGSKLEKHKIKKSTKQAFAGQVDLDLLRCQQLKLYILKAGRALLSHQDKLRQILSQPAVQETGTVHTDDGAVVSPDLGDMSPEGPQPPMILLQQLLASATQPSPVKAIFDKQELEAAALAVCQCLAVESTHPSSPGFEDCSSSEATTPVAVQHIRPARVKRRKQSPVPALPIVVQLMEMGFSRRNIEFALKSLTGASGNASSLPGVEALVGWLLDHSDIQVTELSDADTVSDEYSDEEVVEDVDDAAYSMSTGAVVTESQTYKKRADFLSNDDYAVYVRENIQVGMMVRCCRAYEEVCEGDVGKVIKLDRDGLHDLNVQCDWQQKGGTYWVRYIHVELIGYPPPSSSSHIKIGDKVRVKASVTTPKYKWGSVTHQSVGVVKAFSANGKDIIVDFPQQSHWTGLLSEMELVPSIHPGVTCDGCQMFPINGSRFKCRNCDDFDFCETCFKTKKHNTRHTFGRINEPGQSAVFCGRSGKQLKRCHSSQPGMLLDSWSRMVKSLNVSSSVNQASRLIDGSEPCWQSSGSQGKHWIRLEIFPDVLVHRLKMIVDPADSSYMPSLVVVSGGNSLNNLIELKTININPSDTTVPLLNDCTEYHRYIEIAIKQCRSSGIDCKIHGLILLGRIRAEEEDLAAVPFLASDNEEEEDEKGNSGSLIRKKAAGLESAATIRTKVFVWGLNDKDQLGGLKGSKIKVPSFSETLSALNVVQVAGGSKSLFAVTVEGKVYACGEATNGRLGLGISSGTVPIPRQITALSSYVVKKVAVHSGGRHATALTVDGKVFSWGEGDDGKLGHFSRMNCDKPRLIEALKTKRIRDIACGSSHSAALTSSGELYTWGLGEYGRLGHGDNTTQLKPKMVKVLLGHRVIQVACGSRDAQTLALTDEGLVFSWGDGDFGKLGRGGSEGCNIPQNIERLNGQGVCQIECGAQFSLALTKSGVVWTWGKGDYFRLGHGSDVHVRKPQVVEGLRGKKIVHVAVGALHCLAVTDSGQVYAWGDNDHGQQGNGTTTVNRKPTLVQGLEGQKITRVACGSSHSVAWTTVDVATPSVHEPVLFQTARDPLGASYLGVPSDADSSAASNKISGASNSKPNRPSLAKILLSLDGNLAKQQALSHILTALQIMYARDAVVGALMPAAMIAPVECPSFSSAAPSDASAMASPMNGEECMLAVDIEDRLSPNPWQEKREIVSSEDAVTPSAVTPSAPSASARPFIPVTDDLGAASIIAETMTKTKEDVESQNKAAGPEPQALDEFTSLLIADDTRVVVDLLKLSVCSRAGDRGRDVLSAVLSGMGTAYPQVADMLLELCVTELEDVATDSQSGRLSSQPVVVESSHPYTDDTSTSGTVKIPGAEGLRVEFDRQCSTERRHDPLTVMDGVNRIVSVRSGREWSDWSSELRIPGDELKWKFISDGSVNGWGWRFTVYPIMPAAGPKELLSDRCVLSCPSMDLVTCLLDFRLNLASNRSIVPRLAASLAACAQLSALAASHRMWALQRLRKLLTTEFGQSININRLLGENDGETRALSFTGSALAALVKGLPEALQRQFEYEDPIVRGGKQLLHSPFFKVLVALACDLELDTLPCCAETHKWAWFRRYCMASRVAVALDKRTPLPRLFLDEVAKKIRELMADSENMDVLHESHDIFKREQDEQLVQWMNRRPDDWTLSAGGSGTIYGWGHNHRGQLGGIEGAKVKVPTPCEALATLRPVQLIGGEQTLFAVTADGKLYATGYGAGGRLGIGGTESVSTPTLLESIQHVFIKKVAVNSGGKHCLALSSEGEVYSWGEAEDGKLGHGNRSPCDRPRVIESLRGIEVVDVAAGGAHSACVTAAGDLYTWGKGRYGRLGHSDSEDQLKPKLVEALQGHRVVDIACGSGDAQTLCLTDDDTVWSWGDGDYGKLGRGGSDGCKVPMKIDSLTGLGVVKVECGSQFSVALTKSGAVYTWGKGDYHRLGHGSDDHVRRPRQVQGLQGKKVIAIATGSLHCVCCTEDGEVYTWGDNDEGQLGDGTTNAIQRPRLVAALQGKKVNRVACGSAHTLAWSTSKPASAGKLPAQVPMEYNHLQEIPIIALRNRLLLLHHLSELFCPCIPMFDLEGSLDETGLGPSVGFDTLRGILISQGKEAAFRKVVQATMVRDRQHGPVVELNRIQVKRSRSKGGLAGPDGTKSVFGQMCAKMSSFGPDSLLLPHRVWKVKFVGESVDDCGGGYSESIAEICEELQNGLTPLLIVTPNGRDESGANRDCYLLSPAARAPVHSSMFRFLGVLLGIAIRTGSPLSLNLAEPVWKQLAGMSLTIADLSEVDKDFIPGLMYIRDNEATSEEFEAMSLPFTVPSASGQDIQLSSKHTHITLDNRAEYVRLAINYRLHEFDEQVAAVREGMARVVPVPLLSLFTGYELETMVCGSPDIPLHLLKSVATYKGIEPSASLIQWFWEVMESFSNTERSLFLRFVWGRTRLPRTIADFRGRDFVIQVLDKYNPPDHFLPESYTCFFLLKLPRYSCKQVLEEKLKYAIHFCKSIDTDDYARIALTGEPAADDSSDDSDNEDVDSFASDSTQDYLTGH

SEQ ID NO: 66 - protein, 957 aa, Homo sapiens
MNFAEREGSKRYCIQTKHVAILCAVVVGVGLIVGLAVGLTRSCDSSGDGGPGTAPAPSHLPSSTASPSGPPAQDQDICPASEDESGQWKNFRLPDFVNPVHYDLHVKPLLEEDTYTGTVSISINLSAPTRYLWLHLRETRITRLPELKRPSGDQVQVRRCFEYKKQEYVVVEAEEELTPSSGDGLYLLTMEFAGWLNGSLVGFYRTTYTENGQVKSIVATDHEPTDARKSFPCFDEPNKKATYTISITHPKEYGALSNMPVAKEESVDDKWTRTTFEKSVPMSTYLVCFAVHQFDSVKRISNSGKPLTIYVQPEQKHTAEYAANITKSVFDYFEEYFAMNYSLPKLDKIAIPDFGTGAMENWGLITYRETNLLYDPKESASSNQQRVATVVAHELVHQWFGNIVTMDWWEDLWLNEGFASFFEFLGVNHAETDWQMRDQMLLEDVLPVQEDDSLMSSHPIIVTVTTPDEITSVFDGISYSKGSSILRMLEDWIKPENFQKGCQMYLEKYQFKNAKTSDFWAALEEASRLPVKEVMDTWTRQMGYPVLNVNGVKNITQKRFLLDPRANPSQPPSDLGYTWNIPVKWTEDNITSSVLFNRSEKEGITLNSSNPSGNAFLKINPDHIGFYRVNYEVATWDSIATALSLNHKTFSSADRASLIDDAFALARAQLLDYKVALNLTKYLKREENFLPWQRVISAVTYIISMFEDDKELYPMIEEYFQGQVKPIADSLGWNDAGDHVTKLLRSSVLGFACKMGDREALNNASSLFEQWLNGTVSLPVNLRLLVYRYGMQNSGNEISWNYTLEQYQKTSLAQEKEKLLYGLASVKNVTLLSRYLDLLKDTNLIKTQDVFTVIRYISYNSYGKNMAWNWIQLNWDYLVNRYTLNNRNLGRIVTIAEPFNTELQLWQMESFFAKYPQAGAGEKPREQVLETVKNNIEWLKQHRNTIREWFFNLLESG

SEQ ID NO: 67 - protein, 1816 aa, Homo sapiens
MALSSAWRSVLPLWLLWSAACSRAASGDDNAFPFDIEGSSAVGRQDPPETSEPRVALGRLPPAAEKCNAGFFHTLSGECVPCDCNGNSNECLDGSGYCVHCQRNTTGEHCEKCLDGYIGDSIRGAPQFCQPCPCPLPHLANFAESCYRKNGAVRCICNENYAGPNCERCAPGYYGNPLLIGSTCKKCDCSGNSDPNLIFEDCDEVTGQCRNCLRNTTGFKCERCAPGYYGDARIAKNCAVCNCGGGPCDSVTGECLEEGFEPPTGCDKCVWDLTDALRLAALSIEEGKSGVLSVSSGAAAHRHVNEINATIYLLKTKLSERENQYALRKIQINNAENTMKSLLSDVEELVEKENQASRKGQLVQKESMDTINHASQLVEQAHDMRDKIQEINNKMLYYGEEHELSPKEISEKLVLAQKMLEEIRSRQPFFTQRELVDEEADEAYELLSQAESWQRLHNETRTLFPVVLEQLDDYNAKLSDLQEALDQALNYVRDAEDMNRATAARQRDHEKQQERVREQMEVVNMSLSTSADSLTTPRLTLSELDDIIKNASGIYAEIDGAKSELQVKLSNLSNLSHDLVQEAIDHAQDLQQEANELSRKLHSSDMNGLVQKALDASNVYENIVNYVSEANETAEFALNTTDRIYDAVSGIDTQIIYHKDESENLLNQARELQAKAESSSDEAVADTSRRVGGALARKSALKTRLSDAVKQLQAAERGDAQQRLGQSRLITEEANRTTMEVQQATAPMANNLTNWSQNLQHFDSSAYNTAVNSARDAVRNLTEVVPQLLDQLRTVEQKRPASNVSASIQRIRELIAQTRSVASKIQVSMMFDGQSAVEVHSRTSMDDLKAFTSLSLYMKPPVKRPELTETADQFILYLGSKNAKKEYMGLAIKNDNLVYVYNLGTKDVEIPLDSKPVSSWPAYFSIVKIERVGKHGKVFLTVPSLSSTAEEKFIKKGEFSGDDSLLDLDPEDTVFYVGGVPSNFKLPTSLNLPGFVGCLELATLNNDVISLYNFKHIYNMDPSTSVPCARDKLAFTQSRAASYFFDGSGYAVVRDITRRGKFGQVTRFDIEVRTPADNGLILLMVNGSMFFRLEMRNGYLHVFYDFGFSGGPVHLEDTLKKAQINDAKYHEISIIYHNDKKMILVVDRRHVKSMDNEKMKIPFTDIYIGGAPPEILQSRALRAHLPLDINFRGCMKGFQFQKKDFNLLEQTETLGVGYGCPEDSLISRRAYFNGQSFIASIQKISFFDGFEGGFNFRTLQPNGLLFYYASGSDVFSISLDNGTVIMDVKGIKVQSVDKQYNDGLSHFVISSVSPTRYELIVDKSRVGSKNPTKGKIEQTQASEKKFYFGGSPISAQYANFTGCISNAYFTRVDRDVEVEDFQRYTEKVHTSLYECPIESSPLFLLHKKGKNLSKPKASQNKKGGKSKDAPSWDPVALKLPERNTPRNSHCHLSNSPRAIEHAYQYGGTANSRQEFEHLKGDFGAKSQFSIRLRTRSSHGMIFYVSDQEENDFMTLFLAHGRLVYMFNVGHKKLKIRSQEKYNDGLWHDVIFIRERSSGRLVIDGLRVLEESLPPTEATWKIKGPIYLGGVAPGKAVKNVQINSIYSFSGCLSNLQLNGASITSASQTFSVTPCFEGPMETGTYFSTEGGYVVLDESFNIGLKFEIAFEVRPRSSSGTLVHGHSVNGEYLNVHMKNGQVIVKVNNGIRDFSTSVTPKQSLCDGRWHRITVIRDSNVVQLDVDSEVNHVVGPLNPKPIDHREPVFVGGVPESLLTPRLAPSKPFTGCIRHFVIDGHPVSFSKAALVSGAVSINSCPAA

SEQ ID NO: 68 - protein, 5405 aa, Homo sapiens
MGALWSWWILWAGATLLWGLTQEASVDLKNTGREEFLTAFLQNYQLAYSKAYPRLLISSLSESPASVSILSQADNTSKKVTVRPGESVMVNISAKAEMIGSKIFQHAVVIHSDYAISVQALNAKPDTAELTLLRPIQALGTEYFVLTPPGTSARNVKEFAVVAGAAGASVSVTLKGSVTFNGKFYPAGDVLRVTLQPYNVAQLQSSVDLSGSKVTASSPVAVLSGHSCAQKHTTCNHVVEQLLPTSAWGTHYVVPTLASQSRYDLAFVVASQATKLTYNHGGITGSRGLQAGDVVEFEVRPSWPLYLSANVGIQVLLFGTGAIRNEVTYDPYLVLIPDVAAYCPAYVVKSVPGCEGVALVVAQTKAISGLTIDGHAVGAKLTWEAVPGSEFSYAEVELGTADMIHTAEATTNLGLLTFGLAKAIGYATAADCGRTVLSPVEPSCEGMQCAAGQRCQVVGGKAGCVAESTAVCRAQGDPHYTTFDGRRYDMMGTCSYTMVELCSEDDTLPAFSVEAKNEHRGSRRVSYVGLVTVRAYSHSVSLTRGEVGFVLVDNQRSRLPVSLSEGRLRVYQSGPRAVVELVFGLVVTYDWDCQLALSLPARFQDQVCGLCGNYNGDPADDFLTPDGALAPDAVEFASSWKLDDGDYLCEDGCQNNCPACTPGQAQHYEGDRLCGMLTKLDGPFAVCHDTLDPRPFLEQCVYDLCVVGGERLSLCRGLSAYAQACLELGISVGDWRSPANCPLSCPANSRYELCGPACPTSCNGAAAPSNCSGRPCVEGCVCLPGFVASGGACVPASSCGCTFQGLQLAPGQEVWADELCQRRCTCNGATHQVTCRDKQSCPAGERCSVQNGLLGCYPDRFGTCQGSGDPHYVSFDGRRFDFMGTCTYLLVGSCGQNAALPAFRVLVENEHRGSQTVSYTRAVRVEARGVKVAVRREYPGQVLVDDVLQYLPFQAADGQVQVFRQGRDAVVRTDFGLTVTYDWNARVTAKVPSSYAEALCGLCGNFNGDPADDLALRGGGQAANALAFGNSWQEETRPGCGATEPGDCPKLDSLVAQQLQSKNECGILADPKGPFRECHSKLDPQGAVRDCVYDRCLLPGQSGPLCDALATYAAACQAAGATVHPWRSEELCPLSCPPHSHYEACSYGCPLSCGDLPVPGGCGSECHEGCVCDEGFALSGESCLPLASCGCVHQGTYHPPGQTFYPGPGCDSLCHCQEGGLVSCESSSCGPHEACQPSGGSLGCVAVGSSTCQASGDPHYTTFDGRRFDFMGTCVYVLAQTCGTRPGLHRFAVLQENVAWGNGRVSVTRVITVQVANFTLRLEQRQWKVTVNGVDMKLPVVLANGQIRASQHGSDVVIETDFGLRVAYDLVYYVRVTVPGNYYQQMCGLCGNYNGDPKDDFQKPNGSQAGNANEFGNSWEEVVPDSPCLPPTPCPPGSEDCIPSHKCPPELEKKYQKEEFCGLLSSPTGPLSSCHKLVDPQGPLKDCIFDLCLGGGNLSILCSNIHAYVSACQAAGGHVEPWRTETFCPMECPPNSHYELCADTCSLGCSALSAPPQCQDGCAEGCQCDSGFLYNGQACVPIQQCGCYHNGVYYEPEQTVLIDNCRQQCTCHAGKGMVCQEHSCKPGQVCQPSGGILSCVTKDPCHGVTCRPQETCKEQGGQGVCLPNYEATCWLWGDPHYHSFDGRKFDFQGTCNYVLATTGCPGVSTQGLTPFTVTTKNQNRGNPAVSYVRVVTVAALGTNISIHKDEIGKVRVNGVLTALPVSVADGRISVTQGASKALLVADFGLQVSYDWNWRVDVTLPSSYHGAVCGLCGNMDRNPNNDQVFPNGTLAPSIPIWGGSWRAPGWDPLCWDECRGSCPTCPEDRLEQYEGPGFCGPLAPGTGGPFTTCHAHVPPESFFKGCVLDVCMGGGDRDILCKALASYVAACQAAGVVIEDWRAQVGCEITCPENSHYEVCGSPCPASCPSPAPLTTPAVCEGPCVEGCQCDAGFVLSADRCVPLNNGCGCWANGTYHEAGSEFWADGTCSQWCRCGPGGGSLVCTPASCGLGEVCGLLPSGQHGCQPVSTAECQAWGDPHYVTLDGHRFNFQGTCEYLLSAPCHGPPLGAENFTVTVANEHRGSQAVSYTRSVTLQIYNHSLTLSARWPRKLQVDGVFVTLPFQLDSLLHAHLSGADVVVTTTSGLSLAFDGDSFVRLRVPAAYAGSLCGLCGNYNQDPADDLKAVGGKPAGWQVGGAQGCGECVSKPCPSPCTPEQQESFGGPDACGVISATDGPLAPCHGLVPPAQYFQGCLLDACQVQGHPGGLCPAVATYVAACQAAGAQLREWRRPDFCPFQCPAHSHYELCGDSCPGSCPSLSAPEGCESACREGCVCDAGFVLSGDTCVPVGQCGCLHDDRYYPLGQTFYPGPGCDSLCRCREGGEVSCEPSSCGPHETCRPSGGSLGCVAVGSTTCQASGDPHYTTFDGRRFDFMGTCVYVLAQTCGTRPGLHRFAVLQENVAWGNGRVSVTRVITVQVANFTLRLEQRQWKVTVNGVDMKLPVVLANGQIRASQHGSDVVIETDFGLRVAYDLVYYVRVTVPGNYYQLMCGLCGNYNGDPKDDFQKPNGSQAGNANEFGNSWEEVVPDSPCLPPPTCPPGSEGCIPSEECPPELEKKYQKEEFCGLLSSPTGPLSSCHKLVDPQGPLKDCIFDLCLGGGNLSILCSNIHAYVSACQAAGGQVEPWRNETFCPMECPQNSHYELCADTCSLGCSALSAPLQCPDGCAEGCQCDSGFLYNGQACVPIQQCGCYHNGAYYEPEQTVLIDNCRQQCTCHVGKVVVCQEHSCKPGQVCQPSGGILSCVNKDPCHGVTCRPQETCKEQGGQGVCLPNYEATCWLWGDPHYHSFDGRKFDFQGTCNYVLATTGCPGVSTQGLTPFTVTTKNQNRGNPAVSYVRVVTVAALGTNISIHKDEIGKVRVNGVLTALPVSVADGRISVTQGASKALLVADFGLQVSYDWNWRVDVTLPSSYHGAVCGLCGNMDRNPNNDQVFPNGTLAPSIPIWGGSWRAPGWDPLCWDECRGSCPTCPEDRLEQYEGPGFCGPLAPGTGGPFTTCHAHVPPESFFKGCVLDVCMGGGDRDILCKALASYVAACQAAGVVIEDWRAQVGCEITCPENSHYEVCGPPCPASCPSPAPLTTPAVCEGPCVEGCQCDAGFVLSADRCVPLNNGCGCWANGTYHEAGSEFWADGTCSQWCRCGPGGGSLVCTPASCGLGEVCGLLPSGQHGCQPVSTAECQAWGDPHYVTLDGHRFDFQGTCEYLLSAPCHGPPLGAENFTVTVANEHRGSQAVSYTRSVTLQIYNHSLTLSARWPRKLQVDGVFVTLPFQLDSLLHAHLSGADVVVTTTSGLSLAFDGDSFVRLRVPAAYAGSLCGLCGNYNQDPADDLKAVGGKPAGWQVGGAQGCGECVSKPCPSPCTPEQQESFGGPDACGVISATDGPLAPCHGLVPPAQYFQGCLLDACQVQGHPGGLCPAVATYVAACQAAGAQLREWRRPDFCPFQCPAHSHYELCGDSCPGSCPSLSAPEGCESACREGCVCDAGFVLSGDTCVPVGQCGCLHDDRYYPLGQTFYPGPGCDSLCRCREGGEVSCEPSSCGPHETCRPSGGSLGCVAVGSTTCQASGDPHYTTFDGHRFDFMGTCVYVLAQTCGTRPGLHRFAVLQENVAWGNGRVSVTRVITVQVANFTLRLEQRQWKVTVNGVDMKLPVVLANGQIRASQHGSDVVIETDFGLRVAYDLVYYVRVTVPGNYYQLMCGLCGNYNGDPKDDFQKPNGSQAGNANEFGNSWEEVVPDSPCLPPPTCPPGSAGCIPSDKCPPELEKKYQKEEFCGLLSSPTGPLSSCHKLVDPQGPLKDCIFDLCLGGGNLSILCSNIHAYVSACQAAGGHVEPWRNETFCPMECPQNSHYELCADTCSLGCSALSAPLQCPDGCAEGCQCDSGFLYNGQACVPIQQCGCYHNGVYYEPEQTVLIDNCRQQCTCHVGKVVVCQEHSCKPGQVCQPSGGILSCVTKDPCHGVTCRPQETCKEQGGQGVCLPNYEATCWLWGDPHYHSFDGRKFDFQGTCNYVLATTGCPGVSTQGLTPFTVTTKNQNRGNPAVSYVRVVTVAALGTNISIHKDEIGKVRVNGVLTALPVSVADGRISVAQGASKALLVADFGLQVSYDWNWRVDVTLPSSYHGAVCGLCGNMDRNPNNDQVFPNGTLAPSIPIWGGSWRAPGWDPLCWDECRGSCPTCPEDRLEQYEGPGFCGPLSSGTGGPFTTCHAHVPPESFFKGCVLDVCMGGGDRDILCKALASYVAACQAAGVVIEDWRAQVGCEITCPENSHYEVCGPPCPASCPSPAPLTTPAVCEGPCVEGCQCDAGFVLSADRCVPLNNGCGCWANGTYHEAGSEFWADGTCSQWCRCGPGGGSLVCTPASCGLGEVCGLLPSGQHGCQPVSTAECQAWGDPHYVTLDGHRFDFQGTCEYLLSAPCHGPPLGAENFTVTVANEHRGSQAVSYTRSVTLQIYNHSLTLSARWPRKLQVDGVFVALPFQLDSLLHAHLSGADVVVTTTSGLSLAFDGDSFVRLRVPAAYAASLCGLCGNYNQDPADDLKAVGGKPAGWQVGGAQGCGECVSKPCPSPCTPEQQESFGGPDACGVISATDGPLAPCHGLVPPAQYFQGCLLDACQVQGHPGGLCPAVATYVAACQAAGAQLGEWRRPDFCPLQCPAHSHYELCGDSCPVSCPSLSAPEGCESACREGCVCDAGFVLSGDTCVPVGQCGCLHDGRYYPLGEVFYPGPECERRCECGPGGHVTCQEGAACGPHEECRLEDGVQACHATGCGRCLANGGIHYITLDGRVYDLHGSCSYVLAQVCHPKPGDEDFSIVLEKNAAGDLQRLLVTVAGQVVSLAQGQQVTVDGEAVALPVAVGRVRVTAEGRNMVLQTTKGLRLLFDGDAHLLMSIPSPFRGRLCGLCGNFNGNWSDDFVLPNGSAASSVETFGAAWRAPGSSKGCGEGCGPQGCPVCLAEETAPYESNEACGQLRNPQGPFATCQAVLSPSEYFRQCVYDLCAQKGDKAFLCRSLAAYTAACQAAGVAVKPWRTDSFCPLHCPAHSHYSICTRTCQGSCAALSGLTGCTTRCFEGCECDDRFLLSQGVCIPVQDCGCTHNGRYLPVNSSLLTSDCSERCSCSSSSGLTCQAAGCPPGRVCEVKAEARNCWATRGLCVLSVGANLTTFDGARGATTSPGVYELSSRCPGLQNTIPWYRVVAEVQICHGKTEAVGQVHIFFQDGMVTLTPNKGVWVNGLRVDLPAEKLASVSVSRTPDGSLLVRQKAGVQVWLGANGKVAVIVSNDHAGKLCGACGNFDGDQTNDWHDSQEKPAMEKWRAQDFSPCYG

SEQ ID NO: 69 - protein, 106 aa, Homo sapiens
TVAAPSVFIFPPSDEQLKSGTASVVCLLNNFYPREAKVQWKVDNALQSGNSQESVTEQDSKDSTYSLSSTLTLSKADYEKHKVYACEVTHQGLSSPVTKSFNRGEC

SEQ ID NO: 70 - protein, 33423 aa, Homo sapiens
MTTQAPTFTQPLQSVVVLEGSTATFEAHISGFPVPEVSWFRDGQVISTSTLPGVQISFSDGRAKLTIPAVTKANSGRYSLKATNGSGQATSTAELLVKAETAPPNFVQRLQSMTVRQGSQVRLQVRVTGIPTPVVKFYRDGAEIQSSLDFQISQEGDLYSLLIAEAYPEDSGTYSVNATNSVGRATSTAELLVQGEEEVPAKKTKTIVSTAQISESRQTRIEKKIEAHFDARSIATVEMVIDGAAGQQLPHKTPPRIPPKPKSRSPTPPSIAAKAQLARQQSPSPIRHSPSPVRHVRAPTPSPVRSVSPAARISTSPIRSVRSPLLMRKTQASTVATGPEVPPPWKQEGYVASSSEAEMRETTLTTSTQIRTEERWEGRYGVQEQVTISGAAGAAASVSASASYAAEAVATGAKEVKQDADKSAAVATVVAAVDMARVREPVISAVEQTAQRTTTTAVHIQPAQEQVRKEAEKTAVTKVVVAADKAKEQELKSRTKEVITTKQEQMHVTHEQIRKETEKTFVPKVVISAAKAKEQETRISEEITKKQKQVTQEAIRQETEITAASMVVVATAKSTKLETVPGAQEETTTQQDQMHLSYEKIMKETRKTVVPKVIVATPKVKEQDLVSRGREGITTKREQVQITQEKMRKEAEKTALSTIAVATAKAKEQETILRTRETMATRQEQIQVTHGKVDVGKKAEAVATVVAAVDQARVREPREPGHLEESYAQQTTLEYGYKERISAAKVAEPPQRPASEPHVVPKAVKPRVIQAPSETHIKTTDQKGMHISSQIKKTTDLTTERLVHVDKRPRTASPHFTVSKISVPKTEHGYEASIAGSAIATLQKELSATSSAQKITKSVKAPTVKPSETRVRAEPTPLPQFPFADTPDTYKSEAGVEVKKEVGVSITGTTVREERFEVLHGREAKVTETARVPAPVEIPVTPPTLVSGLKNVTVIEGESVTLECHISGYPSPTVTWYREDYQIESSIDFQITFQSGIARLMIREAFAEDSGRFTCSAVNEAGTVSTSCYLAVQVSEEFEKETTAVTEKFTTEEKRFVESRDVVMTDTSLTEEQAGPGEPAAPYFITKPVVQKLVEGGSVVFGCQVGGNPKPHVYWKKSGVPLTTGYRYKVSYNKQTGECKLVISMTFADDAGEYTIVVRNKHGETSASASLLEEADYELLMKSQQEMLYQTQVTAFVQEPKVGETAPGFVYSEYEKEYEKEQALIRKKMAKDTVVVRTYVEDQEFHISSFEERLIKEIEYRIIKTTLEELLEEDGEEKMAVDISESEAVESGFDSRIKNYRILEGMGVTFHCKMSGYPLPKIAWYKDGKRIKHGERYQMDFLQDGRASLRIPVVLPEDEGIYTAFASNIKGNAICSGKLYVEPAAPLGAPTYIPTLEPVSRIRSLSPRSVSRSPIRMSPARMSPARMSPARMSPARMSPGRRLEETDESQLERLYKPVFVLKPVSFKCLEGQTARFDLKVVGRPMPETFWFHDGQQIVNDYTHKVVIKEDGTQSLIIVPATPSDSGEWTVVAQNRAGRSSISVILTVEAVEHQVKPMFVEKLKNVNIKEGSRLEMKVRATGNPNPDIVWLKNSDIIVPHKYPKIRIEGTKGEAALKIDSTVSQDSAWYTATAINKAGRDTTRCKVNVEVEFAEPEPERKLIIPRGTYRAKEIAAPELEPLHLRYGQEQWEEGDLYDKEKQQKPFFKKKLTSLRLKRFGPAHFECRLTPIGDPTMVVEWLHDGKPLEAANRLRMINEFGYCSLDYGVAYSRDSGIITCRATNKYGTDHTSATLIVKDEKSLVEESQLPEGRKGLQRIEELERMAHEGALTGVTTDQKEKQKPDIVLYPEPVRVLEGETARFRCRVTGYPQPKVNWYLNGQLIRKSKRFRVRYDGIHYLDIVDCKSYDTGEVKVTAENPEGVIEHKVKLEIQQREDFRSVLRRAPEPRPEFHVHEPGKLQFEVQKVDRPVDTTETKEVVKLKRAERITHEKVPEESEELRSKFKRRTEEGYYEAITAVELKSRKKDESYEELLRKTKDELLHWTKELTEEEKKALAEEGKITIPTFKPDKIELSPSMEAPKIFERIQSQTVGQGSDAHFRVRVVGKPDPECEWYKNGVKIERSDRIYWYWPEDNVCELVIRDVTAEDSASIMVKAINIAGETSSHAFLLVQAKQLITFTQELQDVVAKEKDTMATFECETSEPFVKVKWYKDGMEVHEGDKYRMHSDRKVHFLSILTIDTSDAEDYSCVLVEDENVKTTAKLIVEGAVVEFVKELQDIEVPESYSGELECIVSPENIEGKWYHNDVELKSNGKYTITSRRGRQNLTVKDVTKEDQGEYSFVIDGKKTTCKLKMKPRPIAILQGLSDQKVCEGDIVQLEVKVSLESVEGVWMKDGQEVQPSDRVHIVIDKQSHMLLIEDMTKEDAGNYSFTIPALGLSTSGRVSVYSVDVITPLKDVNVIEGTKAVLECKVSVPDVTSVKWYLNDEQIKPDDRVQAIVKGTKQRLVINRTHASDEGPYKLIVGRVETNCNLSVEKIKIIRGLRDLTCTETQNVVFEVELSHSGIDVLWNFKDKEIKPSSKYKIEAHGKIYKLTVLNMMKDDEGKYTFYAGENMTSGKLTVAGGAISKPLTDQTVAESQEAVFECEVANPDSKGEWLRDGKHLPLTNNIRSESDGHKRRLIIAATKLDDIGEYTYKVATSKTSAKLKVEAVKIKKTLKNLTVTETQDAVFTVELTHPNVKGVQWIKNGVVLESNEKYAISVKGTIYSLRIKNCAIVDESVYGFRLGRLGASARLHVETVKIIKKPKDVTALENATVAFEVSVSHDTVPVKWFHKSVEIKPSDKHRLVSERKVHKLMLQNISPSDAGEYTAVVGQLECKAKLFVETLHITKTMKNIEVPETKTASFECEVSHFNVPSMWLKNGVEIEMSEKFKIVVQGKLHQLIIMNTSTEDSAEYTFVCGNDQVSATLTVTPIMITSMLKDINAEEKDTITFEVTVNYEGISYKWLKNGVEIKSTDKCQMRTKKLTHSLNIRNVHFGDAADYTFVAGKATSTATLYVEARHIEFRKHIKDIKVLEKKRAMFECEVSEPDITVQWMKDDQELQITDRIKIQKEKYVHRLLIPSTRMSDAGKYTVVAGGNVSTAKLFVEGRDVRIRSIKKEVQVIEKQRAVVEFEVNEDDVDAHWYKDGIEINFQVQERHKYVVERRIHRMFISETRQSDAGEYTFVAGRNRSSVTLYVNAPEPPQVLQELQPVTVQSGKPARFCAVISGRPQPKISWYKEEQLLSTGFKCKFLHDGQEYTLLLIEAFPEDAAVYTCEAKNDYGVATTSASLSVEVPEVVSPDQEMPVYPPAIITPLQDTVTSEGQPARFQCRVSGTDLKVSWYSKDKKIKPSRFFRMTQFEDTYQLEIAEAYPEDEGTYTFVASNAVGQVSSTANLSLEAPESILHERIEQEIEMEMKAAPVIKRKIEPLEVALGHLAKFTCEIQSAPNVRFQWFKAGREIYESDKCSIRSSKYISSLEILRTQVVDCGEYTCKASNEYGSVSCTATLTVTEAYPPTFLSRPKSLTTFVGKAAKFICTVTGTPVIETIWQKDGAALSPSPNWRISDAENKHILELSNLTIQDRGVYSCKASNKFGADICQAELIIIDKPHFIKELEPVQSAINKKVHLECQVDEDRKVTVTWSKDGQKLPPGKDYKICFEDKIATLEIPLAKLKDSGTYVCTASNEAGSSSCSATVTVREPPSFVKKVDPSYLMLPGESARLHCKLKGSPVIQVTWFKNNKELSESNTVRMYFVNSEAILDITDVKVEDSGSYSCEAVNDVGSDSCSTEIVIKEPPSFIKTLEPADIVRGTNALLQCEVSGTGPFEISWFKDKKQIRSSKKYRLFSQKSLVCLEIFSFNSADVGEYECVVANEVGKCGCMATHLLKEPPTFVKKVDDLIALGGQTVTLQAAVRGSEPISVTWMKGQEVIREDGKIKMSFSNGVAVLIIPDVQISFGGKYTCLAENEAGSQTSVGELIVKEPAKIIERAELIQVTAGDPATLEYTVAGTPELKPKWYKDGRPLVASKKYRISFKNNVAQLKFYSAELHDSGQYTFEISNEVGSSSCETTFTVLDRDIAPFFTKPLRNVDSVVNGTCRLDCKIAGSLPMRVSWFKDGKEIAASDRYRIAFVEGTASLEIIRVDMNDAGNFTCRATNSVGSKDSSGALIVQEPPSFVTKPGSKDVLPGSAVCLKSTFQGSTPLTIRWFKGNKELVSGGSCYITKEALESSLELYLVKTSDSGTYTCKVSNVAGGVECSANLFVKEPATFVEKLEPSQLLKKGDATQLACKVTGTPPIKITWFANDREIKESSKHRMSFVESTAVLRLTDVGIEDSGEYMCEAQNEAGSDHCSSIVIVKESPYFTKEFKPIEVLKEYDVMLLAEVAGTPPFEITWFKDNTILRSGRKYKTFIQDHLVSLQILKFVAADAGEYQCRVTNEVGSSICSARVTLREPPSFIKKIESTSSLRGGTAAFQATLKGSLPITVTWLKDSDEITEDDNIRMTFENNVASLYLSGIEVKHDGKYVCQAKNDAGIQRCSALLSVKEPATITEEAVSIDVTQGDPATLQVKFSGTKEITAKWFKDGQELTLGSKYKISVTDTVSILKIISTEKKDSGEYTFEVQNDVGRSSCKARINVLDLIIPPSFTKKLKKMDSIKGSFIDLECIVAGSHPISIQWFKDDQEISASEKYKFSFHDNTAFLEISQLEGTDSGTYTCSATNKAGHNQCSGHLTVKEPPYFVEKPQSQDVNPNTRVQLKALVGGTAPMTIKWFKDNKELHSGAARSVWKDDTSTSLELFAAKATDSGTYICQLSNDVGTATSKATLFVKEPPQFIKKPSPVLVLRNGQSTTFECQITGTPKIRVSWYLDGNEITAIQKHGISFIDGLATFQISGARVENSGTYVCEARNDAGTASCSIELKVKEPPTFIRELKPVEVVKYSDVELECEVTGTPPFEVTWLKNNREIRSSKKYTLTDRVSVFNLHITKCDPSDTGEYQCIVSNEGGSCSCSTRVALKEPPSFIKKIENTTTVLKSSATFQSTVAGSPPISITWLKDDQILDEDDNVYISFVDSVATLQIRSVDNGHSGRYTCQAKNESGVERCYAFLLVQEPAQIVEKAKSVDVTEKDPMTLECVVAGTPELKVKWLKDGKQIVPSRYFSMSFENNVASFRIQSVMKQDSGQYTFKVENDFGSSSCDAYLRVLDQNIPPSFTKKLTKMDKVLGSSIHMECKVSGSLPISAQWFKDGKEISTSAKYRLVCHERSVSLEVNNLELEDTANYTCKVSNVAGDDACSGILTVKEPPSFLVKPGRQQAIPDSTVEFKAILKGTPPFKIKWFKDDVELVSGPKCFIGLEGSTSFLNLYSVDASKTGQYTCHVTNDVGSDSCTTMLLVTEPPKFVKKLEASKIVKAGDSSRLECKIAGSPEIRVVWFRNEHELPASDKYRMTFIDSVAVIQMNNLSTEDSGDFICEAQNPAGSTSCSTKVIVKEPPVFSSFPPIVETLKNAEVSLECELSGTPPFEVVWYKDKRQLRSSKKYKIASKNFHTSIHILNVDTSDIGEYHCKAQNEVGSDTCVCTVKLKEPPRFVSKLNSLTVVAGEPAELQASIEGAQPIFVQWLKEKEEVIRESENIRITFVENVATLQFAKAEPANAGKYICQIKNDGGMRENMATLMVLEPAVIVEKAGPMTVTVGETCTLECKVAGTPELSVEWYKDGKLLTSSQKHKFSFYNKISSLRILSVERQDAGTYTFQVQNNVGKSSCTAVVDVSDRAVPPSFTRRLKNTGGVLGASCILECKVAGSSPISVAWFHEKTKIVSGAKYQTTFSDNVCTLQLNSLDSSDMGNYTCVAANVAGSDECRAVLTVQEPPSFVKEPEPLEVLPGKNVTFTSVIRGTPPFKVNWFRGARELVKGDRCNIYFEDTVAELELFNIDISQSGEYTCVVSNNAGQASCTTRLFVKEPAAFLKRLSDHSVEPGKSIILESTYTGTLPISVTWKKDGFNITTSEKCNIVTTEKTCILEILNSTKRDAGQYSCEIENEAGRDVCGALVSTLEPPYFVTELEPLEAAVGDSVSLQCQVAGTPEITVSWYKGDTKLRPTPEYRTYFTNNVATLVFNKVNINDSGEYTCKAENSIGTASSKTVFRIQERQLPPSFARQLKDIEQTVGLPVTLTCRLNGSAPIQVCWYRDGVLLRDDENLQTSFVDNVATLKILQTDLSHSGQYSCSASNPLGTASSSARLTAREPKKSPFFDIKPVSIDVIAGESADFECHVTGAQPMRITWSKDNKEIRPGGNYTITCVGNTPHLRILKVGKGDSGQYTCQATNDVGKDMCSAQLSVKEPPKFVKKLEASKVAKQGESIQLECKISGSPEIKVSWFRNDSELHESWKYNMSFINSVALLTINEASAEDSGDYICEAHNGVGDASCSTALTVKAPPVFTQKPSPVGALKGSDVILQCEISGTPPFEVVWVKDRKQVRNSKKFKITSKHFDTSLHILNLEASDVGEYHCKATNEVGSDTCSCSVKFKEPPRFVKKLSDTSTLIGDAVELRAIVEGFQPISVVWLKDRGEVIRESENTRISFIDNIATLQLGSPEASNSGKYICQIKNDAGMRECSAVLTVLEPARIIEKPEPMTVTTGNPFALECVVTGTPELSAKWFKDGRELSADSKHHITFINKVASLKIPCAEMSDKGLYSFEVKNSVGKSNCTVSVHVSDRIVPPSFIRKLKDVNAILGASVVLECRVSGSAPISVGWFQDGNEIVSGPKCQSSFSENVCTLNLSLLEPSDTGIYTCVAANVAGSDECSAVLTVQEPPSFEQTPDSVEVLPGMSLTFTSVIRGTPPFKVKWFKGSRELVPGESCNISLEDFVTELELFEVQPLESGDYSCLVTNDAGSASCTTHLFVKEPATFVKRLADFSVETGSPIVLEATYTGTPPISVSWIKDEYLISQSERCSITMTEKSTILEILESTIEDYAQYSCLIENEAGQDICEALVSVLEPPYFIEPLEHVEAVIGEPATLQCKVDGTPEIRISWYKEHTKLRSAPAYKMQFKNNVASLVINKVDHSDVGEYSCKADNSVGAVASSAVLVIKARKLPPFFARKLKDVHETLGFPVAFECRINGSEPLQVSWYKDGVLLKDDANLQTSFVHNVATLQILQTDQSHIGQYNCSASNPLGTASSSAKLILSEHEVPPFFDLKPVSVDLALGESGTFKCHVTGTAPIKITWAKDNREIRPGGNYKMTLVENTATLTVLKVGKGDAGQYTCYASNIAGKDSCSAQLGVQEPPRFIKKLEPSRIVKQDEFTRYECKIGGSPEIKVLWYKDETEIQESSKFRMSFVDSVAVLEMHNLSVEDSGDYTCEAHNAAGSASSSTSLKVKEPPIFRKKPHPIETLKGADVHLECELQGTPPFHVSWYKDKRELRSGKKYKIMSENFLTSIHILNVDAADIGEYQCKATNDVGSDTCVGSIALKAPPRFVKKLSDISTVVGKEVQLQTTIEGAEPISVVWFKDKGEIVRESDNIWISYSENIATLQFSRVEPANAGKYTCQIKNDAGMQECFATLSVLEPATIVEKPESIKVTTGDTCTLECTVAGTPELSTKWFKDGKELTSDNKYKISFFNKVSGLKIINVAPSDSGVYSFEVQNPVGKDSCTASLQVSDRTVPPSFTRKLKETNGLSGSSVVMECKVYGSPPISVSWFHEGNEISSGRKYQTTLTDNTCALTVNMLEESDSGDYTCIATNMAGSDECSAPLTVREPPSFVQKPDPMDVLTGTNVTFTSIVKGTPPFSVSWFKGSSELVPGDRCNVSLEDSVAELELFDVDTSQSGEYTCIVSNEAGKASCTTHLYIKAPAKFVKRLNDYSIEKGKPLILEGTFTGTPPISVTWKKNGINVTPSQRCNITTTEKSAILEIPSSTVEDAGQYNCYIENASGKDSCSAQILILEPPYFVKQLEPVKVSVGDSASLQCQLAGTPEIGVSWYKGDTKLRPTTTYKMHFRNNVATLVFNQVDINDSGEYICKAENSVGEVSASTFLTVQEQKLPPSFSRQLRDVQETVGLPVVFDCAISGSEPISVSWYKDGKPLKDSPNVQTSFLDNTATLNIFKTDRSLAGQYSCTATNPIGSASSSARLILTEGKNPPFFDIRLAPVDAVVGESADFECHVTGTQPIKVSWAKDSREIRSGGKYQISYLENSAHLTVLKVDKGDSGQYTCYAVNEVGKDSCTAQLNIKERLIPPSFTKRLSETVEETEGNSFKLEGRVAGSQPITVAWYKNNIEIQPTSNCEITFKNNTLVLQVRKAGMNDAGLYTCKVSNDAGSALCTSSIVIKEPKKPPVFDQHLTPVTVSEGEYVQLSCHVQGSEPIRIQWLKAGREIKPSDRCSFSFASGTAVLELRDVAKADSGDYVCKASNVAGSDTTKSKVTIKDKPAVAPATKKAAVDGRLFFVSEPQSIRVVEKTTATFIAKVGGDPIPNVKWTKGKWRQLNQGGRVFIHQKGDEAKLEIRDTTKTDSGLYRCVAFNEHGEIESNVNLQVDERKKQEKIEGDLRAMLKKTPILKKGAGEEEEIDIMELLKNVDPKEYEKYARMYGITDFRGLLQAFELLKQSQEEETHRLEIEEIERSERDEKEFEELVSFIQQRLSQTEPVTLIKDIENQTVLKDNDAVFEIDIKINYPEIKLSWYKGTEKLEPSDKFEISIDGDRHTLRVKNCQLKDQGNYRLVCGPHIASAKLTVIEPAWERHLQDVTLKEGQTCTMTCQFSVPNVKSEWFRNGRILKPQGRHKTEVEHKVHKLTIADVRAEDQGQYTCKYEDLETSAELRIEAEPIQFTKRIQNIVVSEHQSATFECEVSFDDAIVTWYKGPTELTESQKYNFRNDGRCHYMTIHNVTPDDEGVYSVIARLEPRGEARSTAELYLTTKEIKLELKPPDIPDSRVPIPTMPIRAVPPEEIPPVVAPPIPLLLPTPEEKKPPPKRIEVTKKAVKKDAKKVVAKPKEMTPREEIVKKPPPPTTLIPAKAPEIIDVSSKAEEVKIMTITRKKEVQKEKEAVYEKKQAVHKEKRVFIESFEEPYDELEVEPYTEPFEQPYYEEPDEDYEEIKVEAKKEVHEEWEEDFEEGQEYYEREEGYDEGEEEWEEAYQEREVIQVQKEVYEESHERKVPAKVPEKKAPPPPKVIKKPVIEKIEKTSRRMEEEKVQVTKVPEVSKKIVPQKPSRTPVQEEVIEVKVPAVHTKKMVISEEKMFFASHTEEEVSVTVPEVQKEIVTEEKIHVAISKRVEPPPKVPELPEKPAPEEVAPVPIPKKVEPPAPKVPEVPKKPVPEEKKPVPVPKKEPAAPPKVPEVPKKPVPEEKIPVPVAKKKEAPPAKVPEVQKGVVTEEKITIVTQREESPPPAVPEIPKKKVPEERKPVPRKEEEVPPPPKVPALPKKPVPEEKVAVPVPVAKKAPPPRAEVSKKTVVEEKRFVAEEKLSFAVPQRVEVTRHEVSAEEEWSYSEEEEGVSISVYREEEREEEEEAEVTEYEVMEEPEEYVVEEKLHIISKRVEAEPAEVTERQEKKIVLKPKIPAKIEEPPPAKVPEAPKKIVPEKKVPAPVPKKEKVPPPKVPEEPKKPVPEKKVPPKVIKMEEPLPAKVTERHMQITQEEKVLVAVTKKEAPPKARVPEEPKRAVPEEKVLKLKPKREEEPPAKVTEFRKRVVKEEKVSIEAPKREPQPIKEVTIMEEKERAYTLEEEAVSVQREEEYEEYEEYDYKEFEEYEPTEEYDQYEEYEEREYERYEEHEEYITEPEKPIPVKPVPEEPVPTKPKAPPAKVLKKAVPEEKVPVPIPKKLKPPPPKVPEEPKKVFEEKIRISITKREKEQVTEPAAKVPMKPKRVVAEEKVPVPRKEVAPPVRVPEVPKELEPEEVAFEEEVVTHVEEYLVEEEEEYIHEEEEFITEEEVVPVIPVKVPEVPRKPVPEEKKPVPVPKKKEAPPAKVPEVPKKPEEKVPVLIPKKEKPPPAKVPEVPKKPVPEEKVPVPVPKKVEAPPAKVPEVPKKPVPEKKVPVPAPKKVEAPPAKVPEVPKKLIPEEKKPTPVPKKVEAPPPKVPKKREPVPVPVALPQEEEVLFEEEIVPEEEVLPEEEEVLPEEEEVLPEEEEVLPEEEEIPPEEEEVPPEEEYVPEEEEFVPEEEVLPEVKPKVPVPAPVPEIKKKVTEKKVVIPKKEEAPPAKVPEVPKKVEEKRIILPKEEEVLPVEVTEEPEEEPISEEEIPEEPPSIEEVEEVAPPRVPEVIKKAVPEAPTPVPKKVEAPPAKVSKKIPEEKVPVPVQKKEAPPAKVPEVPKKVPEKKVLVPKKEAVPPAKGRTVLEEKVSVAFRQEVVVKERLELEVVEAEVEEIPEEEEFHEVEEYFEEGEFHEVEEFIKLEQHRVEEEHRVEKVHRVIEVFEAEEVEVFEKPKAPPKGPEISEKIIPPKKPPTKVVPRKEPPAKVPEVPKKIVVEEKVRVPEEPRVPPTKVPEVLPPKEVVPEKKVPVPPAKKPEAPPPKVPEAPKEVVPEKKVPVPPPKKPEVPPTKVPEVPKAAVPEKKVPEAIPPKPESPPPEVPEAPKEVVPEKKVPAAPPKKPEVTPVKVPEAPKEVVPEKKVPVPPPKKPEVPPTKVPEVPKVAVPEKKVPEAIPPKPESPPPEVFEEPEEVALEEPPAEVVEEPEPAAPPQVTVPPKKPVPEKKAPAVVAKKPELPPVKVPEVPKEVVPEKKVPLVVPKKPEAPPAKVPEVPKEVVPEKKVAVPKKPEVPPAKVPEVPKKPVLEEKPAVPVPERAESPPPEVYEEPEEIAPEEEIAPEEEKPVPVAEEEEPEVPPPAVPEEPKKIIPEKKVPVIKKPEAPPPKEPEPEKVIEKPKLKPRPPPPPPAPPKEDVKEKIFQLKAIPKKKVPEKPQVPEKVELTPLKVPGGEKKVRKLLPERKPEPKEEVVLKSVLRKRPEEEEPKVEPKKLEKVKKPAVPEPPPPKPVEEVEVPTVTKRERKIPEPTKVPEIKPAIPLPAPEPKPKPEAEVKTIKPPPVEPEPTPIAAPVTVPVVGKKAEAKAPKEEAAKPKGPIKGVPKKTPSPIEAERRKLRPGSGGEKPPDEAPFTYQLKAVPLKFVKEIKDIILTESEFVGSSAIFECLVSPSTAITTWMKDGSNIRESPKHRFIADGKDRKLHIIDVQLSDAGEYTCVLRLGNKEKTSTAKLVVEELPVRFVKTLEEEVTVVKGQPLYLSCELNKERDVVWRKDGKIVVEKPGRIVPGVIGLMRALTINDADDTDAGTYTVTVENANNLECSSCVKVVEVIRDWLVKPIRDQHVKPKGTAIFACDIAKDTPNIKWFKGYDEIPAEPNDKTEILRDGNHLYLKIKNAMPEDIAEYAVEIEGKRYPAKLTLGEREVELLKPIEDVTIYEKESASFDAEISEADIPGQWKLKGELLRPSPTCEIKAEGGKRFLTLHKVKLDQAGEVLYQALNAITTAILTVKEIELDFAVPLKDVTVPERRQARFECVLTREANVIWSKGPDIIKSSDKFDIIADGKKHILVINDSQFDDEGVYTAEVEGKKTSARLFVTGIRLKFMSPLEDQTVKEGETATFVCELSHEKMHVVWFKNDAKLHTSRTVLISSEGKTHKLEMKEVTLDDISQIKAQVKELSSTAQLKVLEADPYFTVKLHDKTAVEKDEITLKCEVSKDVPVKWFKDGEEIVPSPKYSIKADGLRRILKIKKADLKDKGEYVCDCGTDKTKANVTVEARLIKVEKPLYGVEVFVGETAHFEIELSEPDVHGQWKLKGQPLTASPDCEIIEDGKKHILILHNCQLGMTGEVSFQAANAKSAANLKVKELPLIFITPLSDVKVFEKDEAKFECEVSREPKTFRWLKGTQEITGDDRFELIKDGTKHSMVIKSAAFEDEAKYMFEAEDKHTSGKLIIEGIRLKFLTPLKDVTAKEKESAVFTVELSHDNIRVKWFKNDQRLHTTRSVSMQDEGKTHSITFKDLSIDDTSQIRVEAMGMSSEAKLTVLEGDPYFTGKLQDYTGVEKDEVILQCEISKADAPVKWFKDGKEIKPSKNAVIKADGKKRMLILKKALKSDIGQYTCDCGTDKTSGKLDIEDREIKLVRPLHSVEVMETETARFETEISEDDIHANWKLKGEALLQTPDCEIKEEGKIHSLVLHNCRLDQTGGVDFQAANVKSSAHLRVKPRVIGLLRPLKDVTVTAGETATFDCELSYEDIPVEWYLKGKKLEPSDKVVPRSEGKVHTLTLRDVKLEDAGEVQLTAKDFKTHANLFVKEPPVEFTKPLEDQTVEEGATAVLECEVSRENAKVKWFKNGTEILKSKKYEIVADGRVRKLVIHDCTPEDIKTYTCDAKDFKTSCNLNVVPPHVEFLRPLTDLQVREKEMARFECELSRENAKVKWFKDGAEIKKGKKYDIISKGAVRILVINKCLLDDEAEYSCEVRTARTSGMLTVLEEEAVFTKNLANIEVSETDTIKLVCEVSKPGAEVIWYKGDEEIIETGRYEILTEGRKRILVIQNAHLEDAGNYNCRLPSSRTDGKVKVHELAAEFISKPQNLEILEGEKAEFVCSISKESFPVQWKRDDKTLESGDKYDVIADGKKRVLVVKDATLQDMGTYVVMVGAARAAAHLTVIEKLRIVVPLKDTRVKEQQEVVFNCEVNTEGAKAKWFRNEEAIFDSSKYIILQKDLVYTLRIRDAHLDDQANYNVSLTNHRGENVKSAANLIVEEEDLRIVEPLKDIETMEKKSVTFWCKVNRLNVTLKWTKNGEEVPFDNRVSYRVDKYKHMLTIKDCGFPDEGEYIVTAGQDKSVAELLIIEAPTEFVEHLEDQTVTEFDDAVFSCQLSREKANVKWYRNGREIKEGKKYKFEKDGSIHRLIIKDCRLDDECEYACGVEDRKSRARLFVEEIPVEIIRPPQDILEAPGADVVFLAELNKDKVEVQWLRNNMVVVQGDKHQMMSEGKIHRLQICDIKPRDQGEYRFIAKDKEARAKLELAAAPKIKTADQDLVVDVGKPLTMVVPYDAYPKAEAEWFKENEPLSTKTIDTTAEQTSFRILEAKKGDKGRYKIVLQNKHGKAEGFINLKVIDVPGPVRNLEVTETFDGEVSLAWEEPLTDGGSKIIGYVVERRDIKRKTWVLATDRAESCEFTVTGLQKGGVEYLFRVSARNRVGTGEPVETDNPVEARSKYDVPGPPLNVTITDVNRFGVSLTWEPPEYDGGAEITNYVIELRDKTSIRWDTAMTVRAEDLSATVTDVVEGQEYSFRVRAQNRIGVGKPSAATPFVKVADPIERPSPPVNLTSSDQTQSSVQLKWEPPLKDGGSPILGYIIERCEEGKDNWIRCNMKLVPELTYKVTGLEKGNKYLYRVSAENKAGVSDPSEILGPLTADDAFVEPTMDLSAFKDGLEVIVPNPITILVPSTGYPRPTATWCFGDKVLETGDRVKMKTLSAYAELVISPSERSDKGIYTLKLENRVKTISGEIDVNVIARPSAPKELKFGDITKDSVHLTWEPPDDDGGSPLTGYVVEKREVSRKTWTKVMDFVTDLEFTVPDLVQGKEYLFKVCARNKCGPGEPAYVDEPVNMSTPATVPDPPENVKWRDRTANSIFLTWDPPKNDGGSRIKGYIVERCPRGSDKWVACGEPVAETKMEVTGLEEGKWYAYRVKALNRQGASKPSRPTEEIQAVDTQEAPEIFLDVKLLAGLTVKAGTKIELPATVTGKPEPKITWTKADMILKQDKRITIENVPKKSTVTIVDSKRSDTGTYIIEAVNVCGRATAVVEVNVLDKPGPPAAFDITDVTNESCLLTWNPPRDDGGSKITNYVVERRATDSEVWHKLSSTVKDTNFKATKLIPNKEYIFRVAAENMYGVGEPVQASPITAKYQFDPPGPPTRLEPSDITKDAVTLTWCEPDDDGGSPITGYWVERLDPDTDKWVRCNKMPVKDTTYRVKGLTNKKKYRFRVLAENLAGPGKPSKSTEPILIKDPIDPPWPPGKPTVKDVGKTSVRLNWTKPEHDGGAKIESYVIEMLKTGTDEWVRVAEGVPTTQHLLPGLMEGQEYSFRVRAVNKAGESEPSEPSDPVLCREKLYPPSPPRWLEVINITKNTADLKWTVPEKDGGSPITNYIVEKRDVRRKGWQTVDTTVKDTKCTVTPLTEGSLYVFRVAAENAIGQSDYTEIEDSVLAKDTFTTPGPPYALAVVDVTKRHVDLKWEPPKNDGGRPIQRYVIEKKERLGTRWVKAGKTAGPDCNFRVTDVIEGTEVQFQVRAENEAGVGHPSEPTEILSIEDPTSPPSPPLDLHVTDAGRKHIAIAWKPPEKNGGSPIIGYHVEMCPVGTEKWMRVNSRPIKDLKFKVEEGVVPDKEYVLRVRAVNAIGVSEPSEISENVVAKDPDCKPTIDLETHDIIVIEGEKLSIPVPFRAVPVPTVSWHKDGKEVKASDRLTMKNDHISAHLEVPKSVRADAGIYTITLENKLGSATASINVKVIGLPGPCKDIKASDITKSSCKLTWEPPEFDGGTPILHYVLERREAGRRTYIPVMSGENKLSWTVKDLIPNGEYFFRVKAVNKVGGGEYIELKNPVIAQDPKQPPDPPVDVEVHNPTAEAMTITWKPPLYDGGSKIMGYIIEKIAKGEERWKRCNEHLVPILTYTAKGLEEGKEYQFRVRAENAAGISEPSRATPPTKAVDPIDAPKVILRTSLEVKRGDEIALDASISGSPYPTITWIKDENVIVPEEIKKRAAPLVRRRKGEVQEEEPFVLPLTQRLSIDNSKKGESQLRVRDSLRPDHGLYMIKVENDHGIAKAPCTVSVLDTPGPPINFVFEDIRKTSVLCKWEPPLDDGGSEIINYTLEKKDKTKPDSEWIVVTSTLRHCKYSVTKLIEGKEYLFRVRAENRFGPGPPCVSKPLVAKDPFGPPDAPDKPIVEDVTSNSMLVKWNEPKDNGSPILGYWLEKREVNSTHWSRVNKSLLNALKANVDGLLEGLTYVFRVCAENAAGPGKFSPPSDPKTAHDPISPPGPPIPRVTDTSSTTIELEWEPPAFNGGGEIVGYFVDKQLVGTNEWSRCTEKMIKVRQYTVKEIREGADYKLRVSAVNAAGEGPPGETQPVTVAEPQEPPAVELDVSVKGGIQIMAGKTLRIPAVVTGRPVPTKVWTKEEGELDKDRVVIDNVGTKSELIIKDALRKDHGRYVITATNSCGSKFAAARVEVFDVPGPVLDLKPVVTNRKMCLLNWSDPEDDGGSEITGFIIERKDAKMHTWRQPIETERSKCDITGLLEGQEYKFRVIAKNKFGCGPPVEIGPILAVDPLGPPTSPERLTYTERTKSTITLDWKEPRSNGGSPIQGYIIEKRRHDKPDFERVNKRLCPTTSFLVENLDEHQMYEFRVKAVNEIGESEPSLPLNVVIQDDEVPPTIKLRLSVRGDTIKVKAGEPVHIPADVTGLPMPKIEWSKNETVIEKPTDALQITKEEVSRSEAKTELSIPKAVREDKGTYTVTASNRLGSVFRNVHVEVYDRPSPPRNLAVTDIKAESCYLTWDAPLDNGGSEITHYVIDKRDASRKKAEWEEVTNTAVEKRYGIWKLIPNGQYEFRVRAVNKYGISDECKSDKVVIQDPYRLPGPPGKPKVLARTKGSMLVSWTPPLDNGGSPITGYWLEKREEGSPYWSRVSRAPITKVGLKGVEFNVPRLLEGVKYQFRAMAINAAGIGPPSEPSDPEVAGDPIFPPGPPSCPEVKDKTKSSISLGWKPPAKDGGSPIKGYIVEMQEEGTTDWKRVNEPDKLITTCECVVPNLKELRKYRFRVKAVNEAGESEPSDTTGEIPATDIQEEPEVFIDIGAQDCLVCKAGSQIRIPAVIKGRPTPKSSWEFDGKAKKAMKDGVHDIPEDAQLETAENSSVIIIPECKRSHTGKYSITAKNKAGQKTANCRVKVMDVPGPPKDLKVSDITRGSCRLSWKMPDDDGGDRIKGYVIEKRTIDGKAWTKVNPDCGSTTFVVPDLLSEQQYFFRVRAENRFGIGPPVETIQRTTARDPIYPPDPPIKLKIGLITKNTVHLSWKPPKNDGGSPVTHYIVECLAWDPTGTKKEAWRQCNKRDVEELQFTVEDLVEGGEYEFRVKAVNAAGVSKPSATVGPVTVKDQTCPPSIDLKEFMEVEEGTNVNIVAKIKGVPFPTLTWFKAPPKKPDNKEPVLYDTHVNKLVVDDTCTLVIPQSRRSDTGLYTITAVNNLGTASKEMRLNVLGRPGPPVGPIKFESVSADQMTLSWFPPKDDGGSKITNYVIEKREANRKTWVHVSSEPKECTYTIPKLLEGHEYVFRIMAQNKYGIGEPLDSEPETARNLFSVPGAPDKPTVSSVTRNSMTVNWEEPEYDGGSPVTGYWLEMKDTTSKRWKRVNRDPIKAMTLGVSYKVTGLIEGSDYQFRVYAINAAGVGPASLPSDPATARDPIAPPGPPFPKVTDWTKSSADLEWSPPLKDGGSKVTGYIVEYKEEGKEEWEKGKDKEVRGTKLVVTGLKEGAFYKFRVRAVNIAGIGEPGEVTDVIEMKDRLVSPDLQLDASVRDRIVVHAGGVIRIIAYVSGKPPPTVTWNMNERTLPQEATIETTAISSSMVIKNCQRSHQGVYSLLAKNEAGERKKTIIVDVLDVPGPVGTPFLAHNLTNESCKLTWFSPEDDGGSPITNYVIEKRESDRRAWTPVTYTVTRQNATVQGLIQGKAYFFRIAAENSIGMGPFVETSEALVIREPITVPERPEDLEVKEVTKNTVTLTWNPPKYDGGSEIINYVLESRLIGTEKFHKVTNDNLLSRKYTVKGLKEGDTYEYRVSAVNIVGQGKPSFCTKPITCKDELAPPTLHLDFRDKLTIRVGEAFALTGRYSGKPKPKVSWFKDEADVLEDDRTHIKTTPATLALEKIKAKRSDSGKYCVVVENSTGSRKGFCQVNVVDRPGPPVGPVSFDEVTKDYMVISWKPPLDDGGSKITNYIIEKKEVGKDVWMPVTSASAKTTCKVSKLLEGKDYIFRIHAENLYGISDPLVSDSMKAKDRFRVPDAPDQPIVTEVTKDSALVTWNKPHDGGKPITNYILEKRETMSKRWARVTKDPIHPYTKFRVPDLLEGCQYEFRVSAENEIGIGDPSPPSKPVFAKDPIAKPSPPVNPEAIDTTCNSVDLTWQPPRHDGGSKILGYIVEYQKVGDEEWRRANHTPESCPETKYKVTGLRDGQTYKFRVLAVNAAGESDPAHVPEPVLVKDRLEPPELILDANMAREQHIKVGDTLRLSAIIKGVPFPKVTWKKEDRDAPTKARIDVTPVGSKLEIRNAAHEDGGIYSLTVENPAGSKTVSVKVLVLDKPGPPRDLEVSEIRKDSCYLTWKEPLDDGGSVITNYVVERRDVASAQWSPLSATSKKKSHFAKHLNEGNQYLFRVAAENQYGRGPFVETPKPIKALDPLHPPGPPKDLHHVDVDKTEVSLVWNKPDRDGGSPITGYLVEYQEEGTQDWIKFKTVTNLECVVTGLQQGKTYRFRVKAENIVGLGLPDTTIPIECQEKLVPPSVELDVKLIEGLVVKAGTTVRFPAIIRGVPVPTAKWTTDGSEIKTDEHYTVETDNFSSVLTIKNCLRRDTGEYQITVSNAAGSKTVAVHLTVLDVPGPPTGPINILDVTPEHMTISWQPPKDDGGSPVINYIVEKQDTRKDTWGVVSSGSSKTKLKIPHLQKGCEYVFRVRAENKIGVGPPLDSTPTVAKHKFSPPSPPGKPVVTDITENAATVSWTLPKSDGGSPITGYYMERREVTGKWVRVNKTPIADLKFRVTGLYEGNTYEFRVFAENLAGLSKPSPSSDPIKACRPIKPPGPPINPKLKDKSRETADLVWTKPLSDGGSPILGYVVECQKPGTAQWNRINKDELIRQCAFRVPGLIEGNEYRFRIKAANIVGEGEPRELAESVIAKDILHPPEVELDVTCRDVITVRVGQTIRILARVKGRPEPDITWTKEGKVLVREKRVDLIQDLPRVELQIKEAVRADHGKYIISAKNSSGHAQGSAIVNVLDRPGPCQNLKVTNVTKENCTISWENPLDNGGSEITNFIVEYRKPNQKGWSIVASDVTKRLIKANLLANNEYYFRVCAENKVGVGPTIETKTPILAINPIDRPGEPENLHIADKGKTFVYLKWRRPDYDGGSPNLSYHVERRLKGSDDWERVHKGSIKETHYMVDRCVENQIYEFRVQTKNEGGESDWVKTEEVVVKEDLQKPVLDLKLSGVLTVKAGDTIRLEAGVRGKPFPEVAWTKDKDATDLTRSPRVKIDTRADSSKFSLTKAKRSDGGKYVVTATNTAGSFVAYATVNVLDKPGPVRNLKIVDVSSDRCTVCWDPPEDDGGCEIQNYILEKCETKRMVWSTYSATVLTPGTTVTRLIEGNEYIFRVRAENKIGTGPPTESKPVIAKTKYDKPGRPDPPEVTKVSKEEMTVVWNPPEYDGGKSITGYFLEKKEKHSTRWVPVNKSAIPERRMKVQNLLPDHEYQFRVKAENEIGIGEPSLPSRPVVAKDPIEPPGPPTNFRVVDTTKHSITLGWGKPVYDGGAPIIGYVVEMRPKIADASPDEGWKRCNAAAQLVRKEFTVTSLDENQEYEFRVCAQNQVGIGRPAELKEAIKPKEILEPPEIDLDASMRKLVIVRAGCPIRLFAIVRGRPAPKVTWRKVGIDNVVRKGQVDLVDTMAFLVIPNSTRDDSGKYSLTLVNPAGEKAVFVNVRVLDTPGPVSDLKVSDVTKTSCHVSWAPPENDGGSQVTHYIVEKREADRKTWSTVTPEVKKTSFHVTNLVPGNEYYFRVTAVNEYGPGVPTDVPKPVLASDPLSEPDPPRKLEVTEMTKNSATLAWLPPLRDGGAKIDGYITSYREEEQPADRWTEYSVVKDLSLVVTGLKEGKKYKFRVAARNAVGVSLPREAEGVYEAKEQLLPPKILMPEQITIKAGKKLRIEAHVYGKPHPTCKWKKGEDEVVTSSHLAVHKADSSSILIIKDVTRKDSGYYSLTAENSSGTDTQKIKVVVMDAPGPPQPPFDISDIDADACSLSWHIPLEDGGSNITNYIVEKCDVSRGDWVTALASVTKTSCRVGKLIPGQEYIFRVRAENRFGISEPLTSPKMVAQFPFGVPSEPKNARVTKVNKDCIFVAWDRPDSDGGSPIIGYLIERKERNSLLWVKANDTLVRSTEYPCAGLVEGLEYSFRIYALNKAGSSPPSKPTEYVTARMPVDPPGKPEVIDVTKSTVSLIWARPKHDGGSKIIGYFVEACKLPGDKWVRCNTAPHQIPQEEYTATGLEEKAQYQFRAIARTAVNISPPSEPSDPVTILAENVPPRIDLSVAMKSLLTVKAGTNVCLDATVFGKPMPTVSWKKDGTLLKPAEGIKMAMQRNLCTLELFSVNRKDSGDYTITAENSSGSKSATIKLKVLDKPGPPASVKINKMYSDRAMLSWEPPLEDGGSEITNYIVDKRETSRPNWAQVSATVPITSCSVEKLIEGHEYQFRICAENKYGVGDPVFTEPAIAKNPYDPPGRCDPPVISNITKDHMTVSWKPPADDGGSPITGYLLEKRETQAVNWTKVNRKPIIERTLKATGLQEGTEYEFRVTAINKAGPGKPSDASKAAYARDPQYPPGPPAFPKVYDTTRSSVSLSWGKPAYDGGSPIIGYLVEVKRADSDNWVRCNLPQNLQKTRFEVTGLMEDTQYQFRVYAVNKIGYSDPSDVPDKHYPKDILIPPEGELDADLRKTLILRAGVTMRLYVPVKGRPPPKITWSKPNVNLRDRIGLDIKSTDFDTFLRCENVNKYDAGKYILTLENSCGKKEYTIVVKVLDTPGPPVNVTVKEISKDSAYVTWEPPIIDGGSPIINYVVQKRDAERKSWSTVTTECSKTSFRVANLEEGKSYFFRVFAENEYGIGDPGETRDAVKASQTPGPVVDLKVRSVSKSSCSIGWKKPHSDGGSRIIGYVVDFLTEENKWQRVMKSLSLQYSAKDLTEGKEYTFRVSAENENGEGTPSEITVVARDDVVAPDLDLKGLPDLCYLAKENSNFRLKIPIKGKPAPSVSWKKGEDPLATDTRVSVESSAVNTTLIVYDCQKSDAGKYTITLKNVAGTKEGTISIKVVGKPGIPTGPIKFDEVTAEAMTLKWAPPKDDGGSEITNYILEKRDSVNNKWVTCASAVQKTTFRVTRLHEGMEYTFRVSAENKYGVGEGLKSEPIVARHPFDVPDAPPPPNIVDVRHDSVSLTWTDPKKTGGSPITGYHLEFKERNSLLWKRANKTPIRMRDFKVTGLTEGLEYEFRVMAINLAGVGKPSLPSEPVVALDPIDPPGKPEVINITRNSVTLIWTEPKYDGGHKLTGYIVEKRDLPSKSWMKANHVNVPECAFTVTDLVEGGKYEFRIRAKNTAGAISAPSESTETIICKDEYEAPTIVLDPTIKDGLTIKAGDTIVLNAISILGKPLPKSSWSKAGKDIRPSDITQITSTPTSSMLTIKYATRKDAGEYTITATNPFGTKVEHVKVTVLDVPGPPGPVEISNVSAEKATLTWTPPLEDGGSPIKSYILEKRETSRLLWTVVSEDIQSCRHVATKLIQGNEYIFRVSAVNHYGKGEPVQSEPVKMVDRFGPPGPPEKPEVSNVTKNTATVSWKRPVDDGGSEITGYHVERREKKSLRWVRAIKTPVSDLRCKVTGLQEGSTYEFRVSAENRAGIGPPSEASDSVLMKDAAYPPGPPSNPHVTDTTKKSASLAWGKPHYDGGLEITGYVVEHQKVGDEAWIKDTTGTALRITQFVVPDLQTKEKYNFRISAINDAGVGEPAVIPDVEIVEREMAPDFELDAELRRTLVVRAGLSIRIFVPIKGRPAPEVTWTKDNINLKNRANIENTESFTLLIIPECNRYDTGKFVMTIENPAGKKSGFVNVRVLDTPGPVLNLRPTDITKDSVTLHWDLPLIDGGSRITNYIVEKREATRKSYSTATTKCHKCTYKVTGLSEGCEYFFRVMAENEYGIGEPTETTEPVKASEAPSPPDSLNIMDITKSTVSLAWPKPKHDGGSKITGYVIEAQRKGSDQWTHITTVKGLECVVRNLTEGEEYTFQVMAVNSAGRSAPRESRPVIVKEQTMLPELDLRGIYQKLVIAKAGDNIKVEIPVLGRPKPTVTWKKGDQILKQTQRVNFETTATSTILNINECVRSDSGPYPLTARNIVGEVGDVITIQVHDIPGPPTGPIKFDEVSSDFVTFSWDPPENDGGVPISNYVVEMRQTDSTTWVELATTVIRTTYKATRLTTGLEYQFRVKAQNRYGVGPGITSACIVANYPFKVPGPPGTPQVTAVTKDSMTISWHEPLSDGGSPILGYHVERKERNGILWQTVSKALVPGNIFKSSGLTDGIAYEFRVIAENMAGKSKPSKPSEPMLALDPIDPPGKPVPLNITRHTVTLKWAKPEYTGGFKITSYIVEKRDLPNGRWLKANFSNILENEFTVSGLTEDAAYEFRVIAKNAAGAISPPSEPSDAITCRDDVEAPKIKVDVKFKDTVILKAGEAFRLEADVSGRPPPTMEWSKDGKELEGTAKLEIKIADFSTNLVNKDSTRRDSGAYTLTATNPGGFAKHIFNVKVLDRPGPPEGPLAVTEVTSEKCVLSWFPPLDDGGAKIDHYIVQKRETSRLAWTNVASEVQVTKLKVTKLLKGNEYIFRVMAVNKYGVGEPLESEPVLAVNPYGPPDPPKNPEVTTITKDSMVVCWGHPDSDGGSEIINYIVERRDKAGQRWIKCNKKTLTDLRYKVSGLTEGHEYEFRIMAENAAGISAPSPTSPFYKACDTVFKPGPPGNPRVLDTSRSSISIAWNKPIYDGGSEITGYMVEIALPEEDEWQIVTPPAGLKATSYTITGLTENQEYKIRIYAMNSEGLGEPALVPGTPKAEDRMLPPEIELDADLRKVVTIRACCTLRLFVPIKGRPAPEVKWARDHGESLDKASIESTSSYTLLIVGNVNRFDSGKYILTVENSSGSKSAFVNVRVLDTPGPPQDLKVKEVTKTSVTLTWDPPLLDGGSKIKNYIVEKRESTRKAYSTVATNCHKTSWKVDQLQEGCSYYFRVLAENEYGIGLPAETAESVKASERPLPPGKITLMDVTRNSVSLSWEKPEHDGGSRILGYIVEMQTKGSDKWATCATVKVTEATITGLIQGEEYSFRVSAQNEKGISDPRQLSVPVIAKDLVIPPAFKLLFNTFTVLAGEDLKVDVPFIGRPTPAVTWHKDNVPLKQTTRVNAESTENNSLLTIKDACREDVGHYVVKLTNSAGEAIETLNVIVLDKPGPPTGPVKMDEVTADSITLSWGPPKYDGGSSINNYIVEKRDTSTTTWQIVSATVARTTIKACRLKTGCEYQFRIAAENRYGKSTYLNSEPTVAQYPFKVPGPPGTPVVTLSSRDSMEVQWNEPISDGGSRVIGYHLERKERNSILWVKLNKTPIPQTKFKTTGLEEGVEYEFRVSAENIVGIGKPSKVSECYVARDPCDPPGRPEAIIVTRNSVTLQWKKPTYDGGSKITGYIVEKKELPEGRWMKASFTNIIDTHFEVTGLVEDHRYEFRVIARNAAGVFSEPSESTGAITARDEVDPPRISMDPKYKDTIVVHAGESFKVDADIYGKPIPTIQWIKGDQELSNTARLEIKSTDFATSLSVKDAVRVDSGNYILKAKNVAGERSVTVNVKVLDRPGPPEGPVVISGVTAEKCTLAWKPPLQDGGSDIINYIVERRETSRLVWTVVDANVQTLSCKVTKLLEGNEYTFRIMAVNKYGVGEPLESEPVVAKNPFVVPDAPKAPEVTTVTKDSMIVVWERPASDGGSEILGYVLEKRDKEGIRWTRCHKRLIGELRLRVTGLIENHDYEFRVSAENAAGLSEPSPPSAYQKACDPIYKPGPPNNPKVIDITRSSVFLSWSKPIYDGGCEIQGYIVEKCDVSVGEWTMCTPPTGINKTNIEVEKLLEKHEYNFRICAINKAGVGEHADVPGPIIVEEKLEAPDIDLDLELRKIINIRAGGSLRLFVPIKGRPTPEVKWGKVDGEIRDAAIIDVTSSFTSLVLDNVNRYDSGKYTLTLENSSGTKSAFVTVRVLDTPSPPVNLKVTEITKDSVSITWEPPLLDGGSKIKNYIVEKREATRKSYAAVVTNCHKNSWKIDQLQEGCSYYFRVTAENEYGIGLPAQTADPIKVAEVPQPPGKITVDDVTRNSVSLSWTKPEHDGGSKIIQYIVEMQAKHSEKWSECARVKSLQAVITNLTQGEEYLFRVVAVNEKGRSDPRSLAVPIVAKDLVIEPDVKPAFSSYSVQVGQDLKIEVPISGRPKPTITWTKDGLPLKQTTRINVTDSLDLTTLSIKETHKDDGGQYGITVANVVGQKTASIEIVTLDKPDPPKGPVKFDDVSAESITLSWNPPLYTGGCQITNYIVQKRDTTTTVWDVVSATVARTTLKVTKLKTGTEYQFRIFAENRYGQSFALESDPIVAQYPYKEPGPPGTPFATAISKDSMVIQWHEPVNNGGSPVIGYHLERKERNSILWTKVNKTIIHDTQFKAQNLEEGIEYEFRVYAENIVGVGKASKNSECYVARDPCDPPGTPEPIMVKRNEITLQWTKPVYDGGSMITGYIVEKRDLPDGRWMKASFTNVIETQFTVSGLTEDQRYEFRVIAKNAAGAISKPSDSTGPITAKDEVELPRISMDPKFRDTIVVNAGETFRLEADVHGKPLPTIEWLRGDKEIEESARCEIKNTDFKALLIVKDAIRIDGGQYILRASNVAGSKSFPVNVKVLDRPGPPEGPVQVTGVTSEKCSLTWSPPLQDGGSDISHYVVEKRETSRLAWTVVASEVVTNSLKVTKLLEGNEYVFRIMAVNKYGVGEPLESAPVLMKNPFVLPGPPKSLEVTNIAKDSMTVCWNRPDSDGGSEIIGYIVEKRDRSGIRWIKCNKRRITDLRLRVTGLTEDHEYEFRVSAENAAGVGEPSPATVYYKACDPVFKPGPPTNAHIVDTTKNSITLAWGKPIYDGGSEILGYVVEICKADEEEWQIVTPQTGLRVTRFEISKLTEHQEYKIRVCALNKVGLGEATSVPGTVKPEDKLEAPELDLDSELRKGIVVRAGGSARIHIPFKGRPTPEITWSREEGEFTDKVQIEKGVNYTQLSIDNCDRNDAGKYILKLENSSGSKSAFVTVKVLDTPGPPQNLAVKEVRKDSAFLVWEPPIIDGGAKVKNYVIDKRESTRKAYANVSSKCSKTSFKVENLTEGAIYYFRVMAENEFGVGVPVETVDAVKAAEPPSPPGKVTLTDVSQTSASLMWEKPEHDGGSRVLGYVVEMQPKGTEKWSIVAESKVCNAVVTGLSSGQEYQFRVKAYNEKGKSDPRVLGVPVIAKDLTIQPSLKLPFNTYSIQAGEDLKIEIPVIGRPRPNISWVKDGEPLKQTTRVNVEETATSTVLHIKEGNKDDFGKYTVTATNSAGTATENLSVIVLEKPGPPVGPVRFDEVSADFVVISWEPPAYTGGCQISNYIVEKRDTTTTTWHMVSATVARTTIKITKLKTGTEYQFRIFAENRYGKSAPLDSKAVIVQYPFKEPGPPGTPFVTSISKDQMLVQWHEPVNDGGTKIIGYHLEQKEKNSILWVKLNKTPIQDTKFKTTGLDEGLEYEFKVSAENIVGIGKPSKVSECFVARDPCDPPGRPEAIVITRNNVTLKWKKPAYDGGSKITGYIVEKKDLPDGRWMKASFTNVLETEFTVSGLVEDQRYEFRVIARNAAGNFSEPSDSSGAITARDEIDAPNASLDPKYKDVIVVHAGETFVLEADIRGKPIPDVVWSKDGKELEETAARMEIKSTIQKTTLVVKDCIRTDGGQYILKLSNVGGTKSIPITVKVLDRPGPPEGPLKVTGVTAEKCYLAWNPPLQDGGANISHYIIEKRETSRLSWTQVSTEVQALNYKVTKLLPGNEYIFRVMAVNKYGIGEPLESGPVTACNPYKPPGPPSTPEVSAITKDSMVVTWARPVDDGGTEIEGYILEKRDKEGVRWTKCNKKTLTDLRLRVTGLTEGHSYEFRVAAENAAGVGEPSEPSVFYRACDALYPPGPPSNPKVTDTSRSSVSLAWSKPIYDGGAPVKGYVVEVKEAAADEWTTCTPPTGLQGKQFTVTKLKENTEYNFRICAINSEGVGEPATLPGSVVAQERIEPPEIELDADLRKVVVLRASATLRLFVTIKGRPEPEVKWEKAEGILTDRAQIEVTSSFTMLVIDNVTRFDSGRYNLTLENNSGSKTAFVNVRVLDSPSAPVNLTIREVKKDSVTLSWEPPLIDGGAKITNYIVEKRETTRKAYATITNNCTKTTFRIENLQEGCSYYFRVLASNEYGIGLPAETTEPVKVSEPPLPPGRVTLVDVTRNTATIKWEKPESDGGSKITGYVVEMQTKGSEKWSTCTQVKTLEATISGLTAGEEYVFRVAAVNEKGRSDPRQLGVPVIARDIEIKPSVELPFHTFNVKAREQLKIDVPFKGRPQATVNWRKDGQTLKETTRVNVSSSKTVTSLSIKEASKEDVGTYELCVSNSAGSITVPITIIVLDRPGPPGPIRIDEVSCDSITISWNPPEYDGGCQISNYIVEKKETTSTTWHIVSQAVARTSIKIVRLTTGSEYQFRVCAENRYGKSSYSESSAVVAEYPFSPPGPPGTPKVVHATKSTMLVTWQVPVNDGGSRVIGYHLEYKERSSILWSKANKILIADTQMKVSGLDEGLMYEYRVYAENIAGIGKCSKSCEPVPARDPCDPPGQPEVTNITRKSVSLKWSKPHYDGGAKITGYIVERRELPDGRWLKCNYTNIQETYFEVTELTEDQRYEFRVFARNAADSVSEPSESTGPIIVKDDVEPPRVMMDVKFRDVIVVKAGEVLKINADIAGRPLPVISWAKDGIEIEERARTEIISTDNHTLLTVKDCIRRDTGQYVLTLKNVAGTRSVAVNCKVLDKPGPPAGPLEINGLTAEKCSLSWGRPQEDGGADIDYYIVEKRETSHLAWTICEGELQMTSCKVTKLLKGNEYIFRVTGVNKYGVGEPLESVAIKALDPFTVPSPPTSLEITSVTKESMTLCWSRPESDGGSEISGYIIERREKNSLRWVRVNKKPVYDLRVKSTGLREGCEYEYRVYAENAAGLSLPSETSPLIRAEDPVFLPSPPSKPKIVDSGKTTITIAWVKPLFDGGAPITGYTVEYKKSDDTDWKTSIQSLRGTEYTISGLTTGAEYVFRVKSVNKVGASDPSDSSDPQIAKEREEEPLFDIDSEMRKTLIVKAGASFTMTVPFRGRPVPNVLWSKPDTDLRTRAYVDTTDSRTSLTIENANRNDSGKYTLTIQNVLSAASLTLVVKVLDTPGPPTNITVQDVTKESAVLSWDVPENDGGAPVKNYHIEKREASKKAWVSVTNNCNRLSYKVTNLQEGAIYYFRVSGENEFGVGIPAETKEGVKITEKPSPPEKLGVTSISKDSVSLTWLKPEHDGGSRIVHYVVEALEKGQKNWVKCAVAKSTHHVVSGLRENSEYFFRVFAENQAGLSDPRELLLPVLIKEQLEPPEIDMKNFPSHTVYVRAGSNLKVDIPISGKPLPKVTLSRDGVPLKATMRFNTEITAENLTINLKESVTADAGRYEITAANSSGTTKAFINIVVLDRPGPPTGPVVISDITEESVTLKWEPPKYDGGSQVTNYILLKRETSTAVWTEVSATVARTMMKVMKLTTGEEYQFRIKAENRFGISDHIDSACVTVKLPYTTPGPPSTPWVTNVTRESITVGWHEPVSNGGSAVVGYHLEMKDRNSILWQKANKLVIRTTHFKVTTISAGLIYEFRVYAENAAGVGKPSHPSEPVLAIDACEPPRNVRITDISKNSVSLSWQQPAFDGGSKITGYIVERRDLPDGRWTKASFTNVTETQFIISGLTQNSQYEFRVFARNAVGSISNPSEVVGPITCIDSYGGPVIDLPLEYTEVVKYRAGTSVKLRAGISGKPAPTIEWYKDDKELQTNALVCVENTTDLASILIKDADRLNSGCYELKLRNAMGSASATIRVQILDKPGPPGGPIEFKTVTAEKITLLWRPPADDGGAKITHYIVEKRETSRVVWSMVSEHLEECIITTTKIIKGNEYIFRVRAVNKYGIGEPLESDSVVAKNAFVTPGPPGIPEVTKITKNSMTVVWSRPIADGGSDISGYFLEKRDKKSLGWFKVLKETIRDTRQKVTGLTENSDYQYRVCAVNAAGQGPFSEPSEFYKAADPIDPPGPPAKIRIADSTKSSITLGWSKPVYDGGSAVTGYVVEIRQGEEEEWTTVSTKGEVRTTEYVVSNLKPGVNYYFRVSAVNCAGQGEPIEMNEPVQAKDILEAPEIDLDVALRTSVIAKAGEDVQVLIPFKGRPPPTVTWRKDEKNLGSDARYSIENTDSSSLLTIPQVTRNDTGKYILTIENGVGEPKSSTVSVKVLDTPAACQKLQVKHVSRGTVTLLWDPPLIDGGSPIINYVIEKRDATKRTWSVVSHKCSSTSFKLIDLSEKTPFFFRVLAENEIGIGEPCETTEPVKAAEVPAPIRDLSMKDSTKTSVILSWTKPDFDGGSVITEYVVERKGKGEQTWSHAGISKTCEIEVSQLKEQSVLEFRVFAKNEKGLSDPVTIGPITVKELIITPEVDLSDIPGAQVTVRIGHNVHLELPYKGKPKPSISWLKDGLPLKESEFVRFSKTENKITLSIKNAKKEHGGKYTVILDNAVCRIAVPITVITLGPPSKPKGPIRFDEIKADSVILSWDVPEDNGGGEITCYSIEKRETSQTNWKMVCSSVARTTFKVPNLVKDAEYQFRVRAENRYGVSQPLVSSIIVAKHQFRIPGPPGKPVIYNVTSDGMSLTWDAPVYDGGSEVTGFHVEKKERNSILWQKVNTSPISGREYRATGLVEGLDYQFRVYAENSAGLSSPSDPSKFTLAVSPVDPPGTPDYIDVTRETITLKWNPPLRDGGSKIVGYSIEKRQGNERWVRCNFTDVSECQYTVTGLSPGDRYEFRIIARNAVGTISPPSQSSGIIMTRDENVPPIVEFGPEYFDGLIIKSGESLRIKALVQGRPVPRVTWFKDGVEIEKRMNMEITDVLGSTSLFVRDATRDHRGVYTVEAKNASGSAKAEIKVKVQDTPGKVVGPIRFTNITGEKMTLWWDAPLNDGCAPITHYIIEKRETSRLAWALIEDKCEAQSYTAIKLINGNEYQFRVSAVNKFGVGRPLDSDPVVAQIQYTVPDAPGIPEPSNITGNSITLTWARPESDGGSEIQQYILERREKKSTRWVKVISKRPISETRFKVTGLTEGNEYEFHVMAENAAGVGPASGISRLIKCREPVNPPGPPTVVKVTDTSKTTVSLEWSKPVFDGGMEIIGYIIEMCKADLGDWHKVNAEACVKTRYTVTDLQAGEEYKFRVSAINGAGKGDSCEVTGTIKAVDRLTAPELDIDANFKQTHVVRAGASIRLFIAYQGRPTPTAVWSKPDSNLSLRADIHTTDSFSTLTVENCNRNDAGKYTLTVENNSGSKSITFTVKVLDTPGPPGPITFKDVTRGSATLMWDAPLLDGGARIHHYVVEKREASRRSWQVISEKCTRQIFKVNDLAEGVPYYFRVSAVNEYGVGEPYEMPEPIVATEQPAPPRRLDVVDTSKSSAVLAWLKPDHDGGSRITGYLLEMRQKGSDFWVEAGHTKQLTFTVERLVEKTEYEFRVKAKNDAGYSEPREAFSSVIIKEPQIEPTADLTGITNQLITCKAGSPFTIDVPISGRPAPKVTWKLEEMRLKETDRVSITTTKDRTTLTVKDSMRGDSGRYFLTLENTAGVKTFSVTVVVIGRPGPVTGPIEVSSVSAESCVLSWGEPKDGGGTEITNYIVEKRESGTTAWQLVNSSVKRTQIKVTHLTKYMEYSFRVSSENRFGVSKPLESAPIIAEHPFVPPSAPTRPEVYHVSANAMSIRWEEPYHDGGSKIIGYWVEKKERNTILWVKENKVPCLECNYKVTGLVEGLEYQFRTYALNAAGVSKASEASRPIMAQNPVDAPGRPEVTDVTRSTVSLIWSAPAYDGGSKVVGYIIERKPVSEVGDGRWLKCNYTIVSDNFFTVTALSEGDTYEFRVLAKNAAGVISKGSESTGPVTCRDEYAPPKAELDARLHGDLVTIRAGSDLVLDAAVGGKPEPKIIWTKGDKELDLCEKVSLQYTGKRATAVIKFCDRSDSGKYTLTVKNASGTKAVSVMVKVLDSPGPCGKLTVSRVTQEKCTLAWSLPQEDGGAEITHYIVERRETSRLNWVIVEGECPTLSYVVTRLIKNNEYIFRVRAVNKYGPGVPVESEPIVARNSFTIPSPPGIPEEVGTGKEHIIIQWTKPESDGGNEISNYLVDKREKKSLRWTRVNKDYVVYDTRLKVTSLMEGCDYQFRVTAVNAAGNSEPSEASNFISCREPSYTPGPPSAPRVVDTTKHSISLAWTKPMYDGGTDIVGYVLEMQEKDTDQWYRVHTNATIRNTEFTVPDLKMGQKYSFRVAAVNVKGMSEYSESIAEIEPVERIEIPDLELADDLKKTVTIRAGASLRLMVSVSGRPPPVITWSKQGIDLASRAIIDTTESYSLLIVDKVNRYDAGKYTIEAENQSGKKSATVLVKVYDTPGPCPSVKVKEVSRDSVTITWEIPTIDGGAPVNNYIVEKREAAMRAFKTVTTKCSKTLYRISGLVEGTMYYFRVLPENIYGIGEPCETSDAVLVSEVPLVPAKLEVVDVTKSTVTLAWEKPLYDGGSRLTGYVLEACKAGTERWMKVVTLKPTVLEHTVTSLNEGEQYLFRIRAQNEKGVSEPRETVTAVTVQDLRVLPTIDLSTMPQKTIHVPAGRPVELVIPIAGRPPPAASWFFAGSKLRESERVTVETHTKVAKLTIRETTIRDTGEYTLELKNVTGTTSETIKVIILDKPGPPTGPIKIDEIDATSITISWEPPELDGGAPLSGYVVEQRDAHRPGWLPVSESVTRSTFKFTRLTEGNEYVFRVAATNRFGIGSYLQSEVIECRSSIRIPGPPETLQIFDVSRDGMTLTWYPPEDDGGSQVTGYIVERKEVRADRWVRVNKVPVTMTRYRSTGLTEGLEYEHRVTAINARGSGKPSRPSKPIVAMDPIAPPGKPQNPRVTDTTRTSVSLAWSVPEDEGGSKVTGYLIEMQKVDQHEWTKCNTTPTKIREYTLTHLPQGAEYRFRVLACNAGGPGEPAEVPGTVKVTEMLEYPDYELDERYQEGIFVRQGGVIRLTIPIKGKPFPICKWTKEGQDISKRAMIATSETHTELVIKEADRGDSGTYDLVLENKCGKKAVYIKVRVIGSPNSPEGPLEYDDIQVRSVRVSWRPPADDGGADILGYILERREVPKAAWYTIDSRVRGTSLVVKGLKENVEYHFRVSAENQFGISKPLKSEEPVTPKTPLNPPEPPSNPPEVLDVTKSSVSLSWSRPKDDGGSRVTGYYIERKETSTDKWVRHNKTQITTTMYTVTGLVPDAEYQFRIIAQNDVGLSETSPASEPVVCKDPFDKPSQPGELEILSISKDSVTLQWEKPECDGGKEILGYWVEYRQSGDSAWKKSNKERIKDKQFTIGGLLEATEYEFRVFAENETGLSRPRRTAMSIKTKLTSGEAPGIRKEMKDVTTKLGEAAQLSCQIVGRPLPDIKWYRFGKELIQSRKYKMSSDGRTHTLTVMTEEQEDEGVYTCIATNEVGEVETSSKLLLQATPQFHPGYPLKEKYYGAVGSTLRLHVMYIGRPVPAMTWFHGQKLLQNSENITIENTEHYTHLVMKNVQRKTHAGKYKVQLSNVFGTVDAILDVEIQDKPDKPTGPIVIEALLKNSAVISWKPPADDGGSWITNYVVEKCEAKEGAEWQLVSSAISVTTCRIVNLTENAGYYFRVSAQNTFGISDPLEVSSVVIIKSPFEKPGAPGKPTITAVTKDSCVVAWKPPASDGGAKIRNYYLEKREKKQNKWISVTTEEIRETVFSVKNLIEGLEYEFRVKCENLGGESEWSEISEPITPKSDVPIQAPHFKEELRNLNVRYQSNATLVCKVTGHPKPIVKWYRQGKEIIADGLKYRIQEFKGGYHQLIIASVTDDDATVYQVRATNQGGSVSGTASLEVEVPAKIHLPKTLEGMGAVHALRGEVVSIKIPFSGKPDPVITWQKGQDLIDNNGHYQVIVTRSFTSLVFPNGVERKDAGFYVVCAKNRFGIDQKTVELDVADVPDPPRGVKVSDVSRDSVNLTWTEPASDGGSKITNYIVEKCATTAERWLRVGQARETRYTVINLFGKTSYQFRVIAENKFGLSKPSEPSEPTITKEDKTRAMNYDEEVDETREVSMTKASHSSTKELYEKYMIAEDLGRGEFGIVHRCVETSSKKTYMAKFVKVKGTDQVLVKKEISILNIARHRNILHLHESFESMEELVMIFEFISGLDIFERINTSAFELNEREIVSYVHQVCEALQFLHSHNIGHFDIRPENIIYQTRRSSTIKIIEFGQARQLKPGDNFRLLFTAPEYYAPEVHQHDVVSTATDMWSLGTLVYVLLSGINPFLAETNQQIIENIMNAEYTFDEEAFKEISIEAMDFVDRLLVKERKSRMTASEALQHPWLKQKIERVSTKVIRTLKHRRYYHTLIKKDLNMVVSAARISCGGAIRSQKGVSVAKVKVASIEIGPVSGQIMHAVGEEGGHVKYVCKIENYDQSTQVTWYFGVRQLENSEKYEITYEDGVAILYVKDITKLDDGTYRCKVVNDYGEDSSYAELFVKGVREVYDYYCRRTMKKIKRRTDTMRLLERPPEFTLPLYNKTAYVGENVRFGVTITVHPEPHVTWYKSGQKIKPGDNDKKYTFESDKGLYQLTINSVTTDDDAEYTVVARNKYGEDSCKAKLTVTLHPPPTDSTLRPMFKRLLANAECQEGQSVCFEIRVSGIPPPTLKWEKDGQPLSLGPNIEIIHEGLDYYALHIRDTLPEDTGYYRVTATNTAGSTSCQAHLQVERLRYKKQEFKSKEEHERHVQKQIDKTLRMAEILSGTESVPLTQVAKEALREAAVLYKPAVSTKTVKGEFRLEIEEKKEERKLRMPYDVPEPRKYKQTTIEEDQRIKQFVPMSDMKWYKKIRDQYEMPGKLDRVVQKRPKRIRLSRWEQFYVMPLPRITDQYRPKWRIPKLSQDDLEIVRPARRRTPSPDYDFYYRPRRRSLGDISDEELLLPIDDYLAMKRTEEERLRLEEELELGFSASPPSRSPPHFELSSLRYSSPQAHVKVEETRKDFRYSTYHIPTKAEASTSYAELRERHAQAAYRQPKQRQRIMAEREDEELLRPVTTTQHLSEYKSELDFMSKEEKSRKKSRRQREVTEITEIEEEYEISKHAQRESSSSASRLLRRRRSLSPTYIELMRPVSELIRSRPQPAEEYEDDTERRSPTPERTRPRSPSPVSSERSLSRFERSARFDIFSRYESMKAALKTQKTSERKYEVLSQQPFTLDHAPRITLRMRSHRVPCGQNTRFILNVQSKPTAEVKWYHNGVELQESSKIHYTNTSGVLTLEILDCHTDDSGTYRAVCTNYKGEASDYATLDVTGGDYTTYASQRRDEEVPRSVFPELTRTEAYAVSSFKKTSEMEASSSVREVKSQMTETRESLSSYEHSASAEMKSAALEEKSLEEKSTTRKIKTTLAARILTKPRSMTVYEGESARFSCDTDGEPVPTVTWLRKGQVLSTSARHQVTTTKYKSTFEISSVQASDEGNYSVVVENSEGKQEAEFTLTIQKARVTEKAVTSPPRVKSPEPRVKSPEAVKSPKRVKSPEPSHPKAVSPTETKPTPTEKVQHLPVSAPPKITQFLKAEASKEIAKLTCVVESSVLRAKEVTWYKDGKKLKENGHFQFHYSADGTYELKINNLTESDQGEYVCEISGEGGTSKTNLQFMGQAFKSIHEKVSKISETKKSDQKTTESTVTRKTEPKAPEPISSKPVIVTGLQDTTVSSDSVAKFAVKATGEPRPTAIWTKDGKAITQGGKYKLSEDKGGFFLEIHKTDTSDSGLYTCTVKNSAGSVSSSCKLTIKAIKDTEAQKVSTQKTSEITPQKKAVVQEEISQKALRSEEIKMSEAKSQEKLALKEEASKVLISEEVKKSAATSLEKSIVHEEITKTSQASEEVRTHAEIKAFSTQMSINEGQRLVLKANIAGATDVKWVLNGVELTNSEEYRYGVSGSDQTLTIKQASHRDEGILTCISKTKEGIVKCQYDLTLSKELSDAPAFISQPRSQNINEGQNVLFTCEISGEPSPEIEWFKNNLPISISSNVSISRSRNVYSLEIRNASVSDSGKYTIKAKNFRGQCSATASLMVLPLVEEPSREVVLRTSGDTSLQGSFSSQSVQMSASKQEASFSSFSSSSASSMTEMKFASMSAQSMSSMQESFVEMSSSSFMGISNMTQLESSTSKMLKAGIRGIPPKIEALPSDISIDEGKVLTVACAFTGEPTPEVTWSCGGRKIHSQEQGRFHIENTDDLTTLIIMDVQKQDGGLYTLSLGNEFGSDSATVNIHIRSI

SEQ ID NO: 71 - protein, 27118 aa, Homo sapiens
MTTQAPTFTQPLQSVVVLEGSTATFEAHISGFPVPEVSWFRDGQVISTSTLPGVQISFSDGRAKLTIPAVTKANSGRYSLKATNGSGQATSTAELLVKAETAPPNFVQRLQSMTVRQGSQVRLQVRVTGIPTPVVKFYRDGAEIQSSLDFQISQEGDLYSLLIAEAYPEDSGTYSVNATNSVGRATSTAELLVQGEEEVPAKKTKTIVSTAQISESRQTRIEKKIEAHFDARSIATVEMVIDGAAGQQLPHKTPPRIPPKPKSRSPTPPSIAAKAQLARQQSPSPIRHSPSPVRHVRAPTPSPVRSVSPAARISTSPIRSVRSPLLMRKTQASTVATGPEVPPPWKQEGYVASSSEAEMRETTLTTSTQIRTEERWEGRYGVQEQVTISGAAGAAASVSASASYAAEAVATGAKEVKQDADKSAAVATVVAAVDMARVREPVISAVEQTAQRTTTTAVHIQPAQEQVRKEAEKTAVTKVVVAADKAKEQELKSRTKEVITTKQEQMHVTHEQIRKETEKTFVPKVVISAAKAKEQETRISEEITKKQKQVTQEAIMKETRKTVVPKVIVATPKVKEQDLVSRGREGITTKREQVQITQEKMRKEAEKTALSTIAVATAKAKEQETILRTRETMATRQEQIQVTHGKVDVGKKAEAVATVVAAVDQARVREPREPGHLEESYAQQTTLEYGYKERISAAKVAEPPQRPASEPHVVPKAVKPRVIQAPSETHIKTTDQKGMHISSQIKKTTDLTTERLVHVDKRPRTASPHFTVSKISVPKTEHGYEASIAGSAIATLQKELSATSSAQKITKSVKAPTVKPSETRVRAEPTPLPQFPFADTPDTYKSEAGVEVKKEVGVSITGTTVREERFEVLHGREAKVTETARVPAPVEIPVTPPTLVSGLKNVTVIEGESVTLECHISGYPSPTVTWYREDYQIESSIDFQITFQSGIARLMIREAFAEDSGRFTCSAVNEAGTVSTSCYLAVQVSEEFEKETTAVTEKFTTEEKRFVESRDVVMTDTSLTEEQAGPGEPAAPYFITKPVVQKLVEGGSVVFGCQVGGNPKPHVYWKKSGVPLTTGYRYKVSYNKQTGECKLVISMTFADDAGEYTIVVRNKHGETSASASLLEEADYELLMKSQQEMLYQTQVTAFVQEPKVGETAPGFVYSEYEKEYEKEQALIRKKMAKDTVVVRTYVEDQEFHISSFEERLIKEIEYRIIKTTLEELLEEDGEEKMAVDISESEAVESGFDSRIKNYRILEGMGVTFHCKMSGYPLPKIAWYKDGKRIKHGERYQMDFLQDGRASLRIPVVLPEDEGIYTAFASNIKGNAICSGKLYVEPAAPLGAPTYIPTLEPVSRIRSLSPRSVSRSPIRMSPARMSPARMSPARMSPARMSPGRRLEETDESQLERLYKPVFVLKPVSFKCLEGQTARFDLKVVGRPMPETFWFHDGQQIVNDYTHKVVIKEDGTQSLIIVPATPSDSGEWTVVAQNRAGRSSISVILTVEAVEHQVKPMFVEKLKNVNIKEGSRLEMKVRATGNPNPDIVWLKNSDIIVPHKYPKIRIEGTKGEAALKIDSTVSQDSAWYTATAINKAGRDTTRCKVNVEVEFAEPEPERKLIIPRGTYRAKEIAAPELEPLHLRYGQEQWEEGDLYDKEKQQKPFFKKKLTSLRLKRFGPAHFECRLTPIGDPTMVVEWLHDGKPLEAANRLRMINEFGYCSLDYGVAYSRDSGIITCRATNKYGTDHTSATLIVKDEKSLVEESQLPEGRKGLQRIEELERMAHEGALTGVTTDQKEKQKPDIVLYPEPVRVLEGETARFRCRVTGYPQPKVNWYLNGQLIRKSKRFRVRYDGIHYLDIVDCKSYDTGEVKVTAENPEGVIEHKVKLEIQQREDFRSVLRRAPEPRPEFHVHEPGKLQFEVQKVDRPVDTTETKEVVKLKRAERITHEKVPEESEELRSKFKRRTEEGYYEAITAVELKSRKKDESYEELLRKTKDELLHWTKELTEEEKKALAEEGKITIPTFKPDKIELSPSMEAPKIFERIQSQTVGQGSDAHFRVRVVGKPDPECEWYKNGVKIERSDRIYWYWPEDNVCELVIRDVTAEDSASIMVKAINIAGETSSHAFLLVQAKQLITFTQELQDVVAKEKDTMATFECETSEPFVKVKWYKDGMEVHEGDKYRMHSDRKVHFLSILTIDTSDAEDYSCVLVEDENVKTTAKLIVEGAVVEFVKELQDIEVPESYSGELECIVSPENIEGKWYHNDVELKSNGKYTITSRRGRQNLTVKDVTKEDQGEYSFVIDGKKTTCKLKMKPRPIAILQGLSDQKVCEGDIVQLEVKVSLESVEGVWMKDGQEVQPSDRVHIVIDKQSHMLLIEDMTKEDAGNYSFTIPALGLSTSGRVSVYSVDVITPLKDVNVIEGTKAVLECKVSVPDVTSVKWYLNDEQIKPDDRVQAIVKGTKQRLVINRTHASDEGPYKLIVGRVETNCNLSVEKIKIIRGLRDLTCTETQNVVFEVELSHSGIDVLWNFKDKEIKPSSKYKIEAHGKIYKLTVLNMMKDDEGKYTFYAGENMTSGKLTVAGGAISKPLTDQTVAESQEAVFECEVANPDSKGEWLRDGKHLPLTNNIRSESDGHKRRLIIAATKLDDIGEYTYKVATSKTSAKLKVEAVKIKKTLKNLTVTETQDAVFTVELTHPNVKGVQWIKNGVVLESNEKYAISVKGTIYSLRIKNCAIVDESVYGFRLGRLGASARLHVETVKIIKKPKDVTALENATVAFEVSVSHDTVPVKWFHKSVEIKPSDKHRLVSERKVHKLMLQNISPSDAGEYTAVVGQLECKAKLFVETLHITKTMKNIEVPETKTASFECEVSHFNVPSMWLKNGVEIEMSEKFKIVVQGKLHQLIIMNTSTEDSAEYTFVCGNDQVSATLTVTPIMITSMLKDINAEEKDTITFEVTVNYEGISYKWLKNGVEIKSTDKCQMRTKKLTHSLNIRNVHFGDAADYTFVAGKATSTATLYVEARHIEFRKHIKDIKVLEKKRAMFECEVSEPDITVQWMKDDQELQITDRIKIQKEKYVHRLLIPSTRMSDAGKYTVVAGGNVSTAKLFVEGRDVRIRSIKKEVQVIEKQRAVVEFEVNEDDVDAHWYKDGIEINFQVQERHKYVVERRIHRMFISETRQSDAGEYTFVAGRNRSSVTLYVNAPEPPQVLQELQPVTVQSGKPARFCAVISGRPQPKISWYKEEQLLSTGFKCKFLHDGQEYTLLLIEAFPEDAAVYTCEAKNDYGVATTSASLSVEVPEVVSPDQEMPVYPPAIITPLQDTVTSEGQPARFQCRVSGTDLKVSWYSKDKKIKPSRFFRMTQFEDTYQLEIAEAYPEDEGTYTFVASNAVGQVSSTANLSLEVQALDRQSSGKDVRESAKSQAVADSSFTKEESKISQKEIKSFQGSSYEYEVQVFESVSQSSIHTAASVQDTQLCHTASLSQIAESTELSKECAKESTGEAPKIFLHLQDVTVKCGDTAQFLCVLKDDSFIDVTWTHEGAKIEESERLKQSQNGNIQFLTICNVQLVDQGLYSCIVHNDCGERTTSAVLSVEGAPESILHERIEQEIEMEMKEFSSSFLSAEEEGLHSAELQLSKINETLELLSESPVYPTKFDSEKEGTGPIFIKEVSNADISMGDVATLSVTVIGIPKPKIQWFFNGVLLTPSADYKFVFDGDDHSLIILFTKLEDEGEYTCMASNDYGKTICSAYLKINSKGEGHKDTETESAVAKSLEKLGGPCPPHFLKELKPIRCAQGLPAIFEYTVVGEPAPTVTWFKENKQLCTSVYYTIIHNPNGSGTFIVNDPQREDSGLYICKAENMLGESTCAAELLVLLEDTDMTDTPCKAKSTPEAPEDFPQTPLKGPAVEALDSEQEIATFVKDTILKAALITEENQQLSYEHIAKANELSSQLPLGAQELQSILEQDKLTPESTREFLCINGSIHFQPLKEPSPNLQLQIVQSQKTFSKEGILMPEEPETQAVLSDTEKIFPSAMSIEQINSLTVEPLKTLLAEPEGNYPQSSIEPPMHSYLTSVAEEVLSPKEKTVSDTNREQRVTLQKQEAQSALILSQSLAEGHVESLQSPDVMISQVNYEPLVPSEHSCTEGGKILIESANPLENAGQDSAVRIEEGKSLRFPLALEEKQVLLKEEHSDNVVMPPDQIIESKREPVAIKKVQEVQGRDLLSKESLLSGIPEEQRLNLKIQICRALQAAVASEQPGLFSEWLRNIEKVEVEAVNITQEPRHIMCMYLVTSAKSVTEEVTIIIEDVDPQMANLKMELRDALCAIIYEEIDILTAEGPRIQQGAKTSLQEEMDSFSGSQKVEPITEPEVESKYLISTEEVSYFNVQSRVKYLDATPVTKGVASAVVSDEKQDESLKPSEEKEESSSESGTEEVATVKIQEAEGGLIKEDGPMIHTPLVDTVSEEGDIVHLTTSITNAKEVNWYFENKLVPSDEKFKCLQDQNTYTLVIDKVNTEDHQGEYVCEALNDSGKTATSAKLTVVKRAAPVIKRKIEPLEVALGHLAKFTCEIQSAPNVRFQWFKAGREIYESDKCSIRSSKYISSLEILRTQVVDCGEYTCKASNEYGSVSCTATLTVTVPGGEKKVRKLLPERKPEPKEEVVLKSVLRKRPEEEEPKVEPKKLEKVKKPAVPEPPPPKPVEEVEVPTVTKRERKIPEPTKVPEIKPAIPLPAPEPKPKPEAEVKTIKPPPVEPEPTPIAAPVTVPVVGKKAEAKAPKEEAAKPKGPIKGVPKKTPSPIEAERRKLRPGSGGEKPPDEAPFTYQLKAVPLKFVKEIKDIILTESEFVGSSAIFECLVSPSTAITTWMKDGSNIRESPKHRFIADGKDRKLHIIDVQLSDAGEYTCVLRLGNKEKTSTAKLVVEELPVRFVKTLEEEVTVVKGQPLYLSCELNKERDVVWRKDGKIVVEKPGRIVPGVIGLMRALTINDADDTDAGTYTVTVENANNLECSSCVKVVEVIRDWLVKPIRDQHVKPKGTAIFACDIAKDTPNIKWFKGYDEIPAEPNDKTEILRDGNHLYLKIKNAMPEDIAEYAVEIEGKRYPAKLTLGEREVELLKPIEDVTIYEKESASFDAEISEADIPGQWKLKGELLRPSPTCEIKAEGGKRFLTLHKVKLDQAGEVLYQALNAITTAILTVKEIELDFAVPLKDVTVPERRQARFECVLTREANVIWSKGPDIIKSSDKFDIIADGKKHILVINDSQFDDEGVYTAEVEGKKTSARLFVTGIRLKFMSPLEDQTVKEGETATFVCELSHEKMHVVWFKNDAKLHTSRTVLISSEGKTHKLEMKEVTLDDISQIKAQVKELSSTAQLKVLEADPYFTVKLHDKTAVEKDEITLKCEVSKDVPVKWFKDGEEIVPSPKYSIKADGLRRILKIKKADLKDKGEYVCDCGTDKTKANVTVEARLIKVEKPLYGVEVFVGETAHFEIELSEPDVHGQWKLKGQPLTASPDCEIIEDGKKHILILHNCQLGMTGEVSFQAANAKSAANLKVKELPLIFITPLSDVKVFEKDEAKFECEVSREPKTFRWLKGTQEITGDDRFELIKDGTKHSMVIKSAAFEDEAKYMFEAEDKHTSGKLIIEGIRLKFLTPLKDVTAKEKESAVFTVELSHDNIRVKWFKNDQRLHTTRSVSMQDEGKTHSITFKDLSIDDTSQIRVEAMGMSSEAKLTVLEGDPYFTGKLQDYTGVEKDEVILQCEISKADAPVKWFKDGKEIKPSKNAVIKADGKKRMLILKKALKSDIGQYTCDCGTDKTSGKLDIEDREIKLVRPLHSVEVMETETARFETEISEDDIHANWKLKGEALLQTPDCEIKEEGKIHSLVLHNCRLDQTGGVDFQAANVKSSAHLRVKPRVIGLLRPLKDVTVTAGETATFDCELSYEDIPVEWYLKGKKLEPSDKVVPRSEGKVHTLTLRDVKLEDAGEVQLTAKDFKTHANLFVKEPPVEFTKPLEDQTVEEGATAVLECEVSRENAKVKWFKNGTEILKSKKYEIVADGRVRKLVIHDCTPEDIKTYTCDAKDFKTSCNLNVVPPHVEFLRPLTDLQVREKEMARFECELSRENAKVKWFKDGAEIKKGKKYDIISKGAVRILVINKCLLDDEAEYSCEVRTARTSGMLTVLEEEAVFTKNLANIEVSETDTIKLVCEVSKPGAEVIWYKGDEEIIETGRYEILTEGRKRILVIQNAHLEDAGNYNCRLPSSRTDGKVKVHELAAEFISKPQNLEILEGEKAEFVCSISKESFPVQWKRDDKTLESGDKYDVIADGKKRVLVVKDATLQDMGTYVVMVGAARAAAHLTVIEKLRIVVPLKDTRVKEQQEVVFNCEVNTEGAKAKWFRNEEAIFDSSKYIILQKDLVYTLRIRDAHLDDQANYNVSLTNHRGENVKSAANLIVEEEDLRIVEPLKDIETMEKKSVTFWCKVNRLNVTLKWTKNGEEVPFDNRVSYRVDKYKHMLTIKDCGFPDEGEYIVTAGQDKSVAELLIIEAPTEFVEHLEDQTVTEFDDAVFSCQLSREKANVKWYRNGREIKEGKKYKFEKDGSIHRLIIKDCRLDDECEYACGVEDRKSRARLFVEEIPVEIIRPPQDILEAPGADVVFLAELNKDKVEVQWLRNNMVVVQGDKHQMMSEGKIHRLQICDIKPRDQGEYRFIAKDKEARAKLELAAAPKIKTADQDLVVDVGKPLTMVVPYDAYPKAEAEWFKENEPLSTKTIDTTAEQTSFRILEAKKGDKGRYKIVLQNKHGKAEGFINLKVIDVPGPVRNLEVTETFDGEVSLAWEEPLTDGGSKIIGYVVERRDIKRKTWVLATDRAESCEFTVTGLQKGGVEYLFRVSARNRVGTGEPVETDNPVEARSKYDVPGPPLNVTITDVNRFGVSLTWEPPEYDGGAEITNYVIELRDKTSIRWDTAMTVRAEDLSATVTDVVEGQEYSFRVRAQNRIGVGKPSAATPFVKVADPIERPSPPVNLTSSDQTQSSVQLKWEPPLKDGGSPILGYIIERCEEGKDNWIRCNMKLVPELTYKVTGLEKGNKYLYRVSAENKAGVSDPSEILGPLTADDAFVEPTMDLSAFKDGLEVIVPNPITILVPSTGYPRPTATWCFGDKVLETGDRVKMKTLSAYAELVISPSERSDKGIYTLKLENRVKTISGEIDVNVIARPSAPKELKFGDITKDSVHLTWEPPDDDGGSPLTGYVVEKREVSRKTWTKVMDFVTDLEFTVPDLVQGKEYLFKVCARNKCGPGEPAYVDEPVNMSTPATVPDPPENVKWRDRTANSIFLTWDPPKNDGGSRIKGYIVERCPRGSDKWVACGEPVAETKMEVTGLEEGKWYAYRVKALNRQGASKPSRPTEEIQAVDTQEAPEIFLDVKLLAGLTVKAGTKIELPATVTGKPEPKITWTKADMILKQDKRITIENVPKKSTVTIVDSKRSDTGTYIIEAVNVCGRATAVVEVNVLDKPGPPAAFDITDVTNESCLLTWNPPRDDGGSKITNYVVERRATDSEVWHKLSSTVKDTNFKATKLIPNKEYIFRVAAENMYGVGEPVQASPITAKYQFDPPGPPTRLEPSDITKDAVTLTWCEPDDDGGSPITGYWVERLDPDTDKWVRCNKMPVKDTTYRVKGLTNKKKYRFRVLAENLAGPGKPSKSTEPILIKDPIDPPWPPGKPTVKDVGKTSVRLNWTKPEHDGGAKIESYVIEMLKTGTDEWVRVAEGVPTTQHLLPGLMEGQEYSFRVRAVNKAGESEPSEPSDPVLCREKLYPPSPPRWLEVINITKNTADLKWTVPEKDGGSPITNYIVEKRDVRRKGWQTVDTTVKDTKCTVTPLTEGSLYVFRVAAENAIGQSDYTEIEDSVLAKDTFTTPGPPYALAVVDVTKRHVDLKWEPPKNDGGRPIQRYVIEKKERLGTRWVKAGKTAGPDCNFRVTDVIEGTEVQFQVRAENEAGVGHPSEPTEILSIEDPTSPPSPPLDLHVTDAGRKHIAIAWKPPEKNGGSPIIGYHVEMCPVGTEKWMRVNSRPIKDLKFKVEEGVVPDKEYVLRVRAVNAIGVSEPSEISENVVAKDPDCKPTIDLETHDIIVIEGEKLSIPVPFRAVPVPTVSWHKDGKEVKASDRLTMKNDHISAHLEVPKSVRADAGIYTITLENKLGSATASINVKVIGLPGPCKDIKASDITKSSCKLTWEPPEFDGGTPILHYVLERREAGRRTYIPVMSGENKLSWTVKDLIPNGEYFFRVKAVNKVGGGEYIELKNPVIAQDPKQPPDPPVDVEVHNPTAEAMTITWKPPLYDGGSKIMGYIIEKIAKGEERWKRCNEHLVPILTYTAKGLEEGKEYQFRVRAENAAGISEPSRATPPTKAVDPIDAPKVILRTSLEVKRGDEIALDASISGSPYPTITWIKDENVIVPEEIKKRAAPLVRRRKGEVQEEEPFVLPLTQRLSIDNSKKGESQLRVRDSLRPDHGLYMIKVENDHGIAKAPCTVSVLDTPGPPINFVFEDIRKTSVLCKWEPPLDDGGSEIINYTLEKKDKTKPDSEWIVVTSTLRHCKYSVTKLIEGKEYLFRVRAENRFGPGPPCVSKPLVAKDPFGPPDAPDKPIVEDVTSNSMLVKWNEPKDNGSPILGYWLEKREVNSTHWSRVNKSLLNALKANVDGLLEGLTYVFRVCAENAAGPGKFSPPSDPKTAHDPISPPGPPIPRVTDTSSTTIELEWEPPAFNGGGEIVGYFVDKQLVGTNEWSRCTEKMIKVRQYTVKEIREGADYKLRVSAVNAAGEGPPGETQPVTVAEPQEPPAVELDVSVKGGIQIMAGKTLRIPAVVTGRPVPTKVWTKEEGELDKDRVVIDNVGTKSELIIKDALRKDHGRYVITATNSCGSKFAAARVEVFDVPGPVLDLKPVVTNRKMCLLNWSDPEDDGGSEITGFIIERKDAKMHTWRQPIETERSKCDITGLLEGQEYKFRVIAKNKFGCGPPVEIGPILAVDPLGPPTSPERLTYTERTKSTITLDWKEPRSNGGSPIQGYIIEKRRHDKPDFERVNKRLCPTTSFLVENLDEHQMYEFRVKAVNEIGESEPSLPLNVVIQDDEVPPTIKLRLSVRGDTIKVKAGEPVHIPADVTGLPMPKIEWSKNETVIEKPTDALQITKEEVSRSEAKTELSIPKAVREDKGTYTVTASNRLGSVFRNVHVEVYDRPSPPRNLAVTDIKAESCYLTWDAPLDNGGSEITHYVIDKRDASRKKAEWEEVTNTAVEKRYGIWKLIPNGQYEFRVRAVNKYGISDECKSDKVVIQDPYRLPGPPGKPKVLARTKGSMLVSWTPPLDNGGSPITGYWLEKREEGSPYWSRVSRAPITKVGLKGVEFNVPRLLEGVKYQFRAMAINAAGIGPPSEPSDPEVAGDPIFPPGPPSCPEVKDKTKSSISLGWKPPAKDGGSPIKGYIVEMQEEGTTDWKRVNEPDKLITTCECVVPNLKELRKYRFRVKAVNEAGESEPSDTTGEIPATDIQEEPEVFIDIGAQDCLVCKAGSQIRIPAVIKGRPTPKSSWEFDGKAKKAMKDGVHDIPEDAQLETAENSSVIIIPECKRSHTGKYSITAKNKAGQKTANCRVKVMDVPGPPKDLKVSDITRGSCRLSWKMPDDDGGDRIKGYVIEKRTIDGKAWTKVNPDCGSTTFVVPDLLSEQQYFFRVRAENRFGIGPPVETIQRTTARDPIYPPDPPIKLKIGLITKNTVHLSWKPPKNDGGSPVTHYIVECLAWDPTGTKKEAWRQCNKRDVEELQFTVEDLVEGGEYEFRVKAVNAAGVSKPSATVGPVTVKDQTCPPSIDLKEFMEVEEGTNVNIVAKIKGVPFPTLTWFKAPPKKPDNKEPVLYDTHVNKLVVDDTCTLVIPQSRRSDTGLYTITAVNNLGTASKEMRLNVLGRPGPPVGPIKFESVSADQMTLSWFPPKDDGGSKITNYVIEKREANRKTWVHVSSEPKECTYTIPKLLEGHEYVFRIMAQNKYGIGEPLDSEPETARNLFSVPGAPDKPTVSSVTRNSMTVNWEEPEYDGGSPVTGYWLEMKDTTSKRWKRVNRDPIKAMTLGVSYKVTGLIEGSDYQFRVYAINAAGVGPASLPSDPATARDPIAPPGPPFPKVTDWTKSSADLEWSPPLKDGGSKVTGYIVEYKEEGKEEWEKGKDKEVRGTKLVVTGLKEGAFYKFRVRAVNIAGIGEPGEVTDVIEMKDRLVSPDLQLDASVRDRIVVHAGGVIRIIAYVSGKPPPTVTWNMNERTLPQEATIETTAISSSMVIKNCQRSHQGVYSLLAKNEAGERKKTIIVDVLDVPGPVGTPFLAHNLTNESCKLTWFSPEDDGGSPITNYVIEKRESDRRAWTPVTYTVTRQNATVQGLIQGKAYFFRIAAENSIGMGPFVETSEALVIREPITVPERPEDLEVKEVTKNTVTLTWNPPKYDGGSEIINYVLESRLIGTEKFHKVTNDNLLSRKYTVKGLKEGDTYEYRVSAVNIVGQGKPSFCTKPITCKDELAPPTLHLDFRDKLTIRVGEAFALTGRYSGKPKPKVSWFKDEADVLEDDRTHIKTTPATLALEKIKAKRSDSGKYCVVVENSTGSRKGFCQVNVVDRPGPPVGPVSFDEVTKDYMVISWKPPLDDGGSKITNYIIEKKEVGKDVWMPVTSASAKTTCKVSKLLEGKDYIFRIHAENLYGISDPLVSDSMKAKDRFRVPDAPDQPIVTEVTKDSALVTWNKPHDGGKPITNYILEKRETMSKRWARVTKDPIHPYTKFRVPDLLEGCQYEFRVSAENEIGIGDPSPPSKPVFAKDPIAKPSPPVNPEAIDTTCNSVDLTWQPPRHDGGSKILGYIVEYQKVGDEEWRRANHTPESCPETKYKVTGLRDGQTYKFRVLAVNAAGESDPAHVPEPVLVKDRLEPPELILDANMAREQHIKVGDTLRLSAIIKGVPFPKVTWKKEDRDAPTKARIDVTPVGSKLEIRNAAHEDGGIYSLTVENPAGSKTVSVKVLVLDKPGPPRDLEVSEIRKDSCYLTWKEPLDDGGSVITNYVVERRDVASAQWSPLSATSKKKSHFAKHLNEGNQYLFRVAAENQYGRGPFVETPKPIKALDPLHPPGPPKDLHHVDVDKTEVSLVWNKPDRDGGSPITGYLVEYQEEGTQDWIKFKTVTNLECVVTGLQQGKTYRFRVKAENIVGLGLPDTTIPIECQEKLVPPSVELDVKLIEGLVVKAGTTVRFPAIIRGVPVPTAKWTTDGSEIKTDEHYTVETDNFSSVLTIKNCLRRDTGEYQITVSNAAGSKTVAVHLTVLDVPGPPTGPINILDVTPEHMTISWQPPKDDGGSPVINYIVEKQDTRKDTWGVVSSGSSKTKLKIPHLQKGCEYVFRVRAENKIGVGPPLDSTPTVAKHKFSPPSPPGKPVVTDITENAATVSWTLPKSDGGSPITGYYMERREVTGKWVRVNKTPIADLKFRVTGLYEGNTYEFRVFAENLAGLSKPSPSSDPIKACRPIKPPGPPINPKLKDKSRETADLVWTKPLSDGGSPILGYVVECQKPGTAQWNRINKDELIRQCAFRVPGLIEGNEYRFRIKAANIVGEGEPRELAESVIAKDILHPPEVELDVTCRDVITVRVGQTIRILARVKGRPEPDITWTKEGKVLVREKRVDLIQDLPRVELQIKEAVRADHGKYIISAKNSSGHAQGSAIVNVLDRPGPCQNLKVTNVTKENCTISWENPLDNGGSEITNFIVEYRKPNQKGWSIVASDVTKRLIKANLLANNEYYFRVCAENKVGVGPTIETKTPILAINPIDRPGEPENLHIADKGKTFVYLKWRRPDYDGGSPNLSYHVERRLKGSDDWERVHKGSIKETHYMVDRCVENQIYEFRVQTKNEGGESDWVKTEEVVVKEDLQKPVLDLKLSGVLTVKAGDTIRLEAGVRGKPFPEVAWTKDKDATDLTRSPRVKIDTRADSSKFSLTKAKRSDGGKYVVTATNTAGSFVAYATVNVLDKPGPVRNLKIVDVSSDRCTVCWDPPEDDGGCEIQNYILEKCETKRMVWSTYSATVLTPGTTVTRLIEGNEYIFRVRAENKIGTGPPTESKPVIAKTKYDKPGRPDPPEVTKVSKEEMTVVWNPPEYDGGKSITGYFLEKKEKHSTRWVPVNKSAIPERRMKVQNLLPDHEYQFRVKAENEIGIGEPSLPSRPVVAKDPIEPPGPPTNFRVVDTTKHSITLGWGKPVYDGGAPIIGYVVEMRPKIADASPDEGWKRCNAAAQLVRKEFTVTSLDENQEYEFRVCAQNQVGIGRPAELKEAIKPKEILEPPEIDLDASMRKLVIVRAGCPIRLFAIVRGRPAPKVTWRKVGIDNVVRKGQVDLVDTMAFLVIPNSTRDDSGKYSLTLVNPAGEKAVFVNVRVLDTPGPVSDLKVSDVTKTSCHVSWAPPENDGGSQVTHYIVEKREADRKTWSTVTPEVKKTSFHVTNLVPGNEYYFRVTAVNEYGPGVPTDVPKPVLASDPLSEPDPPRKLEVTEMTKNSATLAWLPPLRDGGAKIDGYITSYREEEQPADRWTEYSVVKDLSLVVTGLKEGKKYKFRVAARNAVGVSLPREAEGVYEAKEQLLPPKILMPEQITIKAGKKLRIEAHVYGKPHPTCKWKKGEDEVVTSSHLAVHKADSSSILIIKDVTRKDSGYYSLTAENSSGTDTQKIKVVVMDAPGPPQPPFDISDIDADACSLSWHIPLEDGGSNITNYIVEKCDVSRGDWVTALASVTKTSCRVGKLIPGQEYIFRVRAENRFGISEPLTSPKMVAQFPFGVPSEPKNARVTKVNKDCIFVAWDRPDSDGGSPIIGYLIERKERNSLLWVKANDTLVRSTEYPCAGLVEGLEYSFRIYALNKAGSSPPSKPTEYVTARMPVDPPGKPEVIDVTKSTVSLIWARPKHDGGSKIIGYFVEACKLPGDKWVRCNTAPHQIPQEEYTATGLEEKAQYQFRAIARTAVNISPPSEPSDPVTILAENVPPRIDLSVAMKSLLTVKAGTNVCLDATVFGKPMPTVSWKKDGTLLKPAEGIKMAMQRNLCTLELFSVNRKDSGDYTITAENSSGSKSATIKLKVLDKPGPPASVKINKMYSDRAMLSWEPPLEDGGSEITNYIVDKRETSRPNWAQVSATVPITSCSVEKLIEGHEYQFRICAENKYGVGDPVFTEPAIAKNPYDPPGRCDPPVISNITKDHMTVSWKPPADDGGSPITGYLLEKRETQAVNWTKVNRKPIIERTLKATGLQEGTEYEFRVTAINKAGPGKPSDASKAAYARDPQYPPGPPAFPKVYDTTRSSVSLSWGKPAYDGGSPIIGYLVEVKRADSDNWVRCNLPQNLQKTRFEVTGLMEDTQYQFRVYAVNKIGYSDPSDVPDKHYPKDILIPPEGELDADLRKTLILRAGVTMRLYVPVKGRPPPKITWSKPNVNLRDRIGLDIKSTDFDTFLRCENVNKYDAGKYILTLENSCGKKEYTIVVKVLDTPGPPVNVTVKEISKDSAYVTWEPPIIDGGSPIINYVVQKRDAERKSWSTVTTECSKTSFRVANLEEGKSYFFRVFAENEYGIGDPGETRDAVKASQTPGPVVDLKVRSVSKSSCSIGWKKPHSDGGSRIIGYVVDFLTEENKWQRVMKSLSLQYSAKDLTEGKEYTFRVSAENENGEGTPSEITVVARDDVVAPDLDLKGLPDLCYLAKENSNFRLKIPIKGKPAPSVSWKKGEDPLATDTRVSVESSAVNTTLIVYDCQKSDAGKYTITLKNVAGTKEGTISIKVVGKPGIPTGPIKFDEVTAEAMTLKWAPPKDDGGSEITNYILEKRDSVNNKWVTCASAVQKTTFRVTRLHEGMEYTFRVSAENKYGVGEGLKSEPIVARHPFDVPDAPPPPNIVDVRHDSVSLTWTDPKKTGGSPITGYHLEFKERNSLLWKRANKTPIRMRDFKVTGLTEGLEYEFRVMAINLAGVGKPSLPSEPVVALDPIDPPGKPEVINITRNSVTLIWTEPKYDGGHKLTGYIVEKRDLPSKSWMKANHVNVPECAFTVTDLVEGGKYEFRIRAKNTAGAISAPSESTETIICKDEYEAPTIVLDPTIKDGLTIKAGDTIVLNAISILGKPLPKSSWSKAGKDIRPSDITQITSTPTSSMLTIKYATRKDAGEYTITATNPFGTKVEHVKVTVLDVPGPPGPVEISNVSAEKATLTWTPPLEDGGSPIKSYILEKRETSRLLWTVVSEDIQSCRHVATKLIQGNEYIFRVSAVNHYGKGEPVQSEPVKMVDRFGPPGPPEKPEVSNVTKNTATVSWKRPVDDGGSEITGYHVERREKKSLRWVRAIKTPVSDLRCKVTGLQEGSTYEFRVSAENRAGIGPPSEASDSVLMKDAAYPPGPPSNPHVTDTTKKSASLAWGKPHYDGGLEITGYVVEHQKVGDEAWIKDTTGTALRITQFVVPDLQTKEKYNFRISAINDAGVGEPAVIPDVEIVEREMAPDFELDAELRRTLVVRAGLSIRIFVPIKGRPAPEVTWTKDNINLKNRANIENTESFTLLIIPECNRYDTGKFVMTIENPAGKKSGFVNVRVLDTPGPVLNLRPTDITKDSVTLHWDLPLIDGGSRITNYIVEKREATRKSYSTATTKCHKCTYKVTGLSEGCEYFFRVMAENEYGIGEPTETTEPVKASEAPSPPDSLNIMDITKSTVSLAWPKPKHDGGSKITGYVIEAQRKGSDQWTHITTVKGLECVVRNLTEGEEYTFQVMAVNSAGRSAPRESRPVIVKEQTMLPELDLRGIYQKLVIAKAGDNIKVEIPVLGRPKPTVTWKKGDQILKQTQRVNFETTATSTILNINECVRSDSGPYPLTARNIVGEVGDVITIQVHDIPGPPTGPIKFDEVSSDFVTFSWDPPENDGGVPISNYVVEMRQTDSTTWVELATTVIRTTYKATRLTTGLEYQFRVKAQNRYGVGPGITSACIVANYPFKVPGPPGTPQVTAVTKDSMTISWHEPLSDGGSPILGYHVERKERNGILWQTVSKALVPGNIFKSSGLTDGIAYEFRVIAENMAGKSKPSKPSEPMLALDPIDPPGKPVPLNITRHTVTLKWAKPEYTGGFKITSYIVEKRDLPNGRWLKANFSNILENEFTVSGLTEDAAYEFRVIAKNAAGAISPPSEPSDAITCRDDVEAPKIKVDVKFKDTVILKAGEAFRLEADVSGRPPPTMEWSKDGKELEGTAKLEIKIADFSTNLVNKDSTRRDSGAYTLTATNPGGFAKHIFNVKVLDRPGPPEGPLAVTEVTSEKCVLSWFPPLDDGGAKIDHYIVQKRETSRLAWTNVASEVQVTKLKVTKLLKGNEYIFRVMAVNKYGVGEPLESEPVLAVNPYGPPDPPKNPEVTTITKDSMVVCWGHPDSDGGSEIINYIVERRDKAGQRWIKCNKKTLTDLRYKVSGLTEGHEYEFRIMAENAAGISAPSPTSPFYKACDTVFKPGPPGNPRVLDTSRSSISIAWNKPIYDGGSEITGYMVEIALPEEDEWQIVTPPAGLKATSYTITGLTENQEYKIRIYAMNSEGLGEPALVPGTPKAEDRMLPPEIELDADLRKVVTIRACCTLRLFVPIKGRPAPEVKWARDHGESLDKASIESTSSYTLLIVGNVNRFDSGKYILTVENSSGSKSAFVNVRVLDTPGPPQDLKVKEVTKTSVTLTWDPPLLDGGSKIKNYIVEKRESTRKAYSTVATNCHKTSWKVDQLQEGCSYYFRVLAENEYGIGLPAETAESVKASERPLPPGKITLMDVTRNSVSLSWEKPEHDGGSRILGYIVEMQTKGSDKWATCATVKVTEATITGLIQGEEYSFRVSAQNEKGISDPRQLSVPVIAKDLVIPPAFKLLFNTFTVLAGEDLKVDVPFIGRPTPAVTWHKDNVPLKQTTRVNAESTENNSLLTIKDACREDVGHYVVKLTNSAGEAIETLNVIVLDKPGPPTGPVKMDEVTADSITLSWGPPKYDGGSSINNYIVEKRDTSTTTWQIVSATVARTTIKACRLKTGCEYQFRIAAENRYGKSTYLNSEPTVAQYPFKVPGPPGTPVVTLSSRDSMEVQWNEPISDGGSRVIGYHLERKERNSILWVKLNKTPIPQTKFKTTGLEEGVEYEFRVSAENIVGIGKPSKVSECYVARDPCDPPGRPEAIIVTRNSVTLQWKKPTYDGGSKITGYIVEKKELPEGRWMKASFTNIIDTHFEVTGLVEDHRYEFRVIARNAAGVFSEPSESTGAITARDEVDPPRISMDPKYKDTIVVHAGESFKVDADIYGKPIPTIQWIKGDQELSNTARLEIKSTDFATSLSVKDAVRVDSGNYILKAKNVAGERSVTVNVKVLDRPGPPEGPVVISGVTAEKCTLAWKPPLQDGGSDIINYIVERRETSRLVWTVVDANVQTLSCKVTKLLEGNEYTFRIMAVNKYGVGEPLESEPVVAKNPFVVPDAPKAPEVTTVTKDSMIVVWERPASDGGSEILGYVLEKRDKEGIRWTRCHKRLIGELRLRVTGLIENHDYEFRVSAENAAGLSEPSPPSAYQKACDPIYKPGPPNNPKVIDITRSSVFLSWSKPIYDGGCEIQGYIVEKCDVSVGEWTMCTPPTGINKTNIEVEKLLEKHEYNFRICAINKAGVGEHADVPGPIIVEEKLEAPDIDLDLELRKIINIRAGGSLRLFVPIKGRPTPEVKWGKVDGEIRDAAIIDVTSSFTSLVLDNVNRYDSGKYTLTLENSSGTKSAFVTVRVLDTPSPPVNLKVTEITKDSVSITWEPPLLDGGSKIKNYIVEKREATRKSYAAVVTNCHKNSWKIDQLQEGCSYYFRVTAENEYGIGLPAQTADPIKVAEVPQPPGKITVDDVTRNSVSLSWTKPEHDGGSKIIQYIVEMQAKHSEKWSECARVKSLQAVITNLTQGEEYLFRVVAVNEKGRSDPRSLAVPIVAKDLVIEPDVKPAFSSYSVQVGQDLKIEVPISGRPKPTITWTKDGLPLKQTTRINVTDSLDLTTLSIKETHKDDGGQYGITVANVVGQKTASIEIVTLDKPDPPKGPVKFDDVSAESITLSWNPPLYTGGCQITNYIVQKRDTTTTVWDVVSATVARTTLKVTKLKTGTEYQFRIFAENRYGQSFALESDPIVAQYPYKEPGPPGTPFATAISKDSMVIQWHEPVNNGGSPVIGYHLERKERNSILWTKVNKTIIHDTQFKAQNLEEGIEYEFRVYAENIVGVGKASKNSECYVARDPCDPPGTPEPIMVKRNEITLQWTKPVYDGGSMITGYIVEKRDLPDGRWMKASFTNVIETQFTVSGLTEDQRYEFRVIAKNAAGAISKPSDSTGPITAKDEVELPRISMDPKFRDTIVVNAGETFRLEADVHGKPLPTIEWLRGDKEIEESARCEIKNTDFKALLIVKDAIRIDGGQYILRASNVAGSKSFPVNVKVLDRPGPPEGPVQVTGVTSEKCSLTWSPPLQDGGSDISHYVVEKRETSRLAWTVVASEVVTNSLKVTKLLEGNEYVFRIMAVNKYGVGEPLESAPVLMKNPFVLPGPPKSLEVTNIAKDSMTVCWNRPDSDGGSEIIGYIVEKRDRSGIRWIKCNKRRITDLRLRVTGLTEDHEYEFRVSAENAAGVGEPSPATVYYKACDPVFKPGPPTNAHIVDTTKNSITLAWGKPIYDGGSEILGYVVEICKADEEEWQIVTPQTGLRVTRFEISKLTEHQEYKIRVCALNKVGLGEATSVPGTVKPEDKLEAPELDLDSELRKGIVVRAGGSARIHIPFKGRPTPEITWSREEGEFTDKVQIEKGVNYTQLSIDNCDRNDAGKYILKLENSSGSKSAFVTVKVLDTPGPPQNLAVKEVRKDSAFLVWEPPIIDGGAKVKNYVIDKRESTRKAYANVSSKCSKTSFKVENLTEGAIYYFRVMAENEFGVGVPVETVDAVKAAEPPSPPGKVTLTDVSQTSASLMWEKPEHDGGSRVLGYVVEMQPKGTEKWSIVAESKVCNAVVTGLSSGQEYQFRVKAYNEKGKSDPRVLGVPVIAKDLTIQPSLKLPFNTYSIQAGEDLKIEIPVIGRPRPNISWVKDGEPLKQTTRVNVEETATSTVLHIKEGNKDDFGKYTVTATNSAGTATENLSVIVLEKPGPPVGPVRFDEVSADFVVISWEPPAYTGGCQISNYIVEKRDTTTTTWHMVSATVARTTIKITKLKTGTEYQFRIFAENRYGKSAPLDSKAVIVQYPFKEPGPPGTPFVTSISKDQMLVQWHEPVNDGGTKIIGYHLEQKEKNSILWVKLNKTPIQDTKFKTTGLDEGLEYEFKVSAENIVGIGKPSKVSECFVARDPCDPPGRPEAIVITRNNVTLKWKKPAYDGGSKITGYIVEKKDLPDGRWMKASFTNVLETEFTVSGLVEDQRYEFRVIARNAAGNFSEPSDSSGAITARDEIDAPNASLDPKYKDVIVVHAGETFVLEADIRGKPIPDVVWSKDGKELEETAARMEIKSTIQKTTLVVKDCIRTDGGQYILKLSNVGGTKSIPITVKVLDRPGPPEGPLKVTGVTAEKCYLAWNPPLQDGGANISHYIIEKRETSRLSWTQVSTEVQALNYKVTKLLPGNEYIFRVMAVNKYGIGEPLESGPVTACNPYKPPGPPSTPEVSAITKDSMVVTWARPVDDGGTEIEGYILEKRDKEGVRWTKCNKKTLTDLRLRVTGLTEGHSYEFRVAAENAAGVGEPSEPSVFYRACDALYPPGPPSNPKVTDTSRSSVSLAWSKPIYDGGAPVKGYVVEVKEAAADEWTTCTPPTGLQGKQFTVTKLKENTEYNFRICAINSEGVGEPATLPGSVVAQERIEPPEIELDADLRKVVVLRASATLRLFVTIKGRPEPEVKWEKAEGILTDRAQIEVTSSFTMLVIDNVTRFDSGRYNLTLENNSGSKTAFVNVRVLDSPSAPVNLTIREVKKDSVTLSWEPPLIDGGAKITNYIVEKRETTRKAYATITNNCTKTTFRIENLQEGCSYYFRVLASNEYGIGLPAETTEPVKVSEPPLPPGRVTLVDVTRNTATIKWEKPESDGGSKITGYVVEMQTKGSEKWSTCTQVKTLEATISGLTAGEEYVFRVAAVNEKGRSDPRQLGVPVIARDIEIKPSVELPFHTFNVKAREQLKIDVPFKGRPQATVNWRKDGQTLKETTRVNVSSSKTVTSLSIKEASKEDVGTYELCVSNSAGSITVPITIIVLDRPGPPGPIRIDEVSCDSITISWNPPEYDGGCQISNYIVEKKETTSTTWHIVSQAVARTSIKIVRLTTGSEYQFRVCAENRYGKSSYSESSAVVAEYPFSPPGPPGTPKVVHATKSTMLVTWQVPVNDGGSRVIGYHLEYKERSSILWSKANKILIADTQMKVSGLDEGLMYEYRVYAENIAGIGKCSKSCEPVPARDPCDPPGQPEVTNITRKSVSLKWSKPHYDGGAKITGYIVERRELPDGRWLKCNYTNIQETYFEVTELTEDQRYEFRVFARNAADSVSEPSESTGPIIVKDDVEPPRVMMDVKFRDVIVVKAGEVLKINADIAGRPLPVISWAKDGIEIEERARTEIISTDNHTLLTVKDCIRRDTGQYVLTLKNVAGTRSVAVNCKVLDKPGPPAGPLEINGLTAEKCSLSWGRPQEDGGADIDYYIVEKRETSHLAWTICEGELQMTSCKVTKLLKGNEYIFRVTGVNKYGVGEPLESVAIKALDPFTVPSPPTSLEITSVTKESMTLCWSRPESDGGSEISGYIIERREKNSLRWVRVNKKPVYDLRVKSTGLREGCEYEYRVYAENAAGLSLPSETSPLIRAEDPVFLPSPPSKPKIVDSGKTTITIAWVKPLFDGGAPITGYTVEYKKSDDTDWKTSIQSLRGTEYTISGLTTGAEYVFRVKSVNKVGASDPSDSSDPQIAKEREEEPLFDIDSEMRKTLIVKAGASFTMTVPFRGRPVPNVLWSKPDTDLRTRAYVDTTDSRTSLTIENANRNDSGKYTLTIQNVLSAASLTLVVKVLDTPGPPTNITVQDVTKESAVLSWDVPENDGGAPVKNYHIEKREASKKAWVSVTNNCNRLSYKVTNLQEGAIYYFRVSGENEFGVGIPAETKEGVKITEKPSPPEKLGVTSISKDSVSLTWLKPEHDGGSRIVHYVVEALEKGQKNWVKCAVAKSTHHVVSGLRENSEYFFRVFAENQAGLSDPRELLLPVLIKEQLEPPEIDMKNFPSHTVYVRAGSNLKVDIPISGKPLPKVTLSRDGVPLKATMRFNTEITAENLTINLKESVTADAGRYEITAANSSGTTKAFINIVVLDRPGPPTGPVVISDITEESVTLKWEPPKYDGGSQVTNYILLKRETSTAVWTEVSATVARTMMKVMKLTTGEEYQFRIKAENRFGISDHIDSACVTVKLPYTTPGPPSTPWVTNVTRESITVGWHEPVSNGGSAVVGYHLEMKDRNSILWQKANKLVIRTTHFKVTTISAGLIYEFRVYAENAAGVGKPSHPSEPVLAIDACEPPRNVRITDISKNSVSLSWQQPAFDGGSKITGYIVERRDLPDGRWTKASFTNVTETQFIISGLTQNSQYEFRVFARNAVGSISNPSEVVGPITCIDSYGGPVIDLPLEYTEVVKYRAGTSVKLRAGISGKPAPTIEWYKDDKELQTNALVCVENTTDLASILIKDADRLNSGCYELKLRNAMGSASATIRVQILDKPGPPGGPIEFKTVTAEKITLLWRPPADDGGAKITHYIVEKRETSRVVWSMVSEHLEECIITTTKIIKGNEYIFRVRAVNKYGIGEPLESDSVVAKNAFVTPGPPGIPEVTKITKNSMTVVWSRPIADGGSDISGYFLEKRDKKSLGWFKVLKETIRDTRQKVTGLTENSDYQYRVCAVNAAGQGPFSEPSEFYKAADPIDPPGPPAKIRIADSTKSSITLGWSKPVYDGGSAVTGYVVEIRQGEEEEWTTVSTKGEVRTTEYVVSNLKPGVNYYFRVSAVNCAGQGEPIEMNEPVQAKDILEAPEIDLDVALRTSVIAKAGEDVQVLIPFKGRPPPTVTWRKDEKNLGSDARYSIENTDSSSLLTIPQVTRNDTGKYILTIENGVGEPKSSTVSVKVLDTPAACQKLQVKHVSRGTVTLLWDPPLIDGGSPIINYVIEKRDATKRTWSVVSHKCSSTSFKLIDLSEKTPFFFRVLAENEIGIGEPCETTEPVKAAEVPAPIRDLSMKDSTKTSVILSWTKPDFDGGSVITEYVVERKGKGEQTWSHAGISKTCEIEVSQLKEQSVLEFRVFAKNEKGLSDPVTIGPITVKELIITPEVDLSDIPGAQVTVRIGHNVHLELPYKGKPKPSISWLKDGLPLKESEFVRFSKTENKITLSIKNAKKEHGGKYTVILDNAVCRIAVPITVITLGPPSKPKGPIRFDEIKADSVILSWDVPEDNGGGEITCYSIEKRETSQTNWKMVCSSVARTTFKVPNLVKDAEYQFRVRAENRYGVSQPLVSSIIVAKHQFRIPGPPGKPVIYNVTSDGMSLTWDAPVYDGGSEVTGFHVEKKERNSILWQKVNTSPISGREYRATGLVEGLDYQFRVYAENSAGLSSPSDPSKFTLAVSPVDPPGTPDYIDVTRETITLKWNPPLRDGGSKIVGYSIEKRQGNERWVRCNFTDVSECQYTVTGLSPGDRYEFRIIARNAVGTISPPSQSSGIIMTRDENVPPIVEFGPEYFDGLIIKSGESLRIKALVQGRPVPRVTWFKDGVEIEKRMNMEITDVLGSTSLFVRDATRDHRGVYTVEAKNASGSAKAEIKVKVQDTPGKVVGPIRFTNITGEKMTLWWDAPLNDGCAPITHYIIEKRETSRLAWALIEDKCEAQSYTAIKLINGNEYQFRVSAVNKFGVGRPLDSDPVVAQIQYTVPDAPGIPEPSNITGNSITLTWARPESDGGSEIQQYILERREKKSTRWVKVISKRPISETRFKVTGLTEGNEYEFHVMAENAAGVGPASGISRLIKCREPVNPPGPPTVVKVTDTSKTTVSLEWSKPVFDGGMEIIGYIIEMCKADLGDWHKVNAEACVKTRYTVTDLQAGEEYKFRVSAINGAGKGDSCEVTGTIKAVDRLTAPELDIDANFKQTHVVRAGASIRLFIAYQGRPTPTAVWSKPDSNLSLRADIHTTDSFSTLTVENCNRNDAGKYTLTVENNSGSKSITFTVKVLDTPGPPGPITFKDVTRGSATLMWDAPLLDGGARIHHYVVEKREASRRSWQVISEKCTRQIFKVNDLAEGVPYYFRVSAVNEYGVGEPYEMPEPIVATEQPAPPRRLDVVDTSKSSAVLAWLKPDHDGGSRITGYLLEMRQKGSDFWVEAGHTKQLTFTVERLVEKTEYEFRVKAKNDAGYSEPREAFSSVIIKEPQIEPTADLTGITNQLITCKAGSPFTIDVPISGRPAPKVTWKLEEMRLKETDRVSITTTKDRTTLTVKDSMRGDSGRYFLTLENTAGVKTFSVTVVVIGRPGPVTGPIEVSSVSAESCVLSWGEPKDGGGTEITNYIVEKRESGTTAWQLVNSSVKRTQIKVTHLTKYMEYSFRVSSENRFGVSKPLESAPIIAEHPFVPPSAPTRPEVYHVSANAMSIRWEEPYHDGGSKIIGYWVEKKERNTILWVKENKVPCLECNYKVTGLVEGLEYQFRTYALNAAGVSKASEASRPIMAQNPVDAPGRPEVTDVTRSTVSLIWSAPAYDGGSKVVGYIIERKPVSEVGDGRWLKCNYTIVSDNFFTVTALSEGDTYEFRVLAKNAAGVISKGSESTGPVTCRDEYAPPKAELDARLHGDLVTIRAGSDLVLDAAVGGKPEPKIIWTKGDKELDLCEKVSLQYTGKRATAVIKFCDRSDSGKYTLTVKNASGTKAVSVMVKVLDSPGPCGKLTVSRVTQEKCTLAWSLPQEDGGAEITHYIVERRETSRLNWVIVEGECPTLSYVVTRLIKNNEYIFRVRAVNKYGPGVPVESEPIVARNSFTIPSPPGIPEEVGTGKEHIIIQWTKPESDGGNEISNYLVDKREKKSLRWTRVNKDYVVYDTRLKVTSLMEGCDYQFRVTAVNAAGNSEPSEASNFISCREPSYTPGPPSAPRVVDTTKHSISLAWTKPMYDGGTDIVGYVLEMQEKDTDQWYRVHTNATIRNTEFTVPDLKMGQKYSFRVAAVNVKGMSEYSESIAEIEPVERIEIPDLELADDLKKTVTIRAGASLRLMVSVSGRPPPVITWSKQGIDLASRAIIDTTESYSLLIVDKVNRYDAGKYTIEAENQSGKKSATVLVKVYDTPGPCPSVKVKEVSRDSVTITWEIPTIDGGAPVNNYIVEKREAAMRAFKTVTTKCSKTLYRISGLVEGTMYYFRVLPENIYGIGEPCETSDAVLVSEVPLVPAKLEVVDVTKSTVTLAWEKPLYDGGSRLTGYVLEACKAGTERWMKVVTLKPTVLEHTVTSLNEGEQYLFRIRAQNEKGVSEPRETVTAVTVQDLRVLPTIDLSTMPQKTIHVPAGRPVELVIPIAGRPPPAASWFFAGSKLRESERVTVETHTKVAKLTIRETTIRDTGEYTLELKNVTGTTSETIKVIILDKPGPPTGPIKIDEIDATSITISWEPPELDGGAPLSGYVVEQRDAHRPGWLPVSESVTRSTFKFTRLTEGNEYVFRVAATNRFGIGSYLQSEVIECRSSIRIPGPPETLQIFDVSRDGMTLTWYPPEDDGGSQVTGYIVERKEVRADRWVRVNKVPVTMTRYRSTGLTEGLEYEHRVTAINARGSGKPSRPSKPIVAMDPIAPPGKPQNPRVTDTTRTSVSLAWSVPEDEGGSKVTGYLIEMQKVDQHEWTKCNTTPTKIREYTLTHLPQGAEYRFRVLACNAGGPGEPAEVPGTVKVTEMLEYPDYELDERYQEGIFVRQGGVIRLTIPIKGKPFPICKWTKEGQDISKRAMIATSETHTELVIKEADRGDSGTYDLVLENKCGKKAVYIKVRVIGSPNSPEGPLEYDDIQVRSVRVSWRPPADDGGADILGYILERREVPKAAWYTIDSRVRGTSLVVKGLKENVEYHFRVSAENQFGISKPLKSEEPVTPKTPLNPPEPPSNPPEVLDVTKSSVSLSWSRPKDDGGSRVTGYYIERKETSTDKWVRHNKTQITTTMYTVTGLVPDAEYQFRIIAQNDVGLSETSPASEPVVCKDPFDKPSQPGELEILSISKDSVTLQWEKPECDGGKEILGYWVEYRQSGDSAWKKSNKERIKDKQFTIGGLLEATEYEFRVFAENETGLSRPRRTAMSIKTKLTSGEAPGIRKEMKDVTTKLGEAAQLSCQIVGRPLPDIKWYRFGKELIQSRKYKMSSDGRTHTLTVMTEEQEDEGVYTCIATNEVGEVETSSKLLLQATPQFHPGYPLKEKYYGAVGSTLRLHVMYIGRPVPAMTWFHGQKLLQNSENITIENTEHYTHLVMKNVQRKTHAGKYKVQLSNVFGTVDAILDVEIQDKPDKPTGPIVIEALLKNSAVISWKPPADDGGSWITNYVVEKCEAKEGAEWQLVSSAISVTTCRIVNLTENAGYYFRVSAQNTFGISDPLEVSSVVIIKSPFEKPGAPGKPTITAVTKDSCVVAWKPPASDGGAKIRNYYLEKREKKQNKWISVTTEEIRETVFSVKNLIEGLEYEFRVKCENLGGESEWSEISEPITPKSDVPIQAPHFKEELRNLNVRYQSNATLVCKVTGHPKPIVKWYRQGKEIIADGLKYRIQEFKGGYHQLIIASVTDDDATVYQVRATNQGGSVSGTASLEVEVPAKIHLPKTLEGMGAVHALRGEVVSIKIPFSGKPDPVITWQKGQDLIDNNGHYQVIVTRSFTSLVFPNGVERKDAGFYVVCAKNRFGIDQKTVELDVADVPDPPRGVKVSDVSRDSVNLTWTEPASDGGSKITNYIVEKCATTAERWLRVGQARETRYTVINLFGKTSYQFRVIAENKFGLSKPSEPSEPTITKEDKTRAMNYDEEVDETREVSMTKASHSSTKELYEKYMIAEDLGRGEFGIVHRCVETSSKKTYMAKFVKVKGTDQVLVKKEISILNIARHRNILHLHESFESMEELVMIFEFISGLDIFERINTSAFELNEREIVSYVHQVCEALQFLHSHNIGHFDIRPENIIYQTRRSSTIKIIEFGQARQLKPGDNFRLLFTAPEYYAPEVHQHDVVSTATDMWSLGTLVYVLLSGINPFLAETNQQIIENIMNAEYTFDEEAFKEISIEAMDFVDRLLVKERKSRMTASEALQHPWLKQKIERVSTKVIRTLKHRRYYHTLIKKDLNMVVSAARISCGGAIRSQKGVSVAKVKVASIEIGPVSGQIMHAVGEEGGHVKYVCKIENYDQSTQVTWYFGVRQLENSEKYEITYEDGVAILYVKDITKLDDGTYRCKVVNDYGEDSSYAELFVKGVREVYDYYCRRTMKKIKRRTDTMRLLERPPEFTLPLYNKTAYVGENVRFGVTITVHPEPHVTWYKSGQKIKPGDNDKKYTFESDKGLYQLTINSVTTDDDAEYTVVARNKYGEDSCKAKLTVTLHPPPTDSTLRPMFKRLLANAECQEGQSVCFEIRVSGIPPPTLKWEKDGQPLSLGPNIEIIHEGLDYYALHIRDTLPEDTGYYRVTATNTAGSTSCQAHLQVERLRYKKQEFKSKEEHERHVQKQIDKTLRMAEILSGTESVPLTQVAKEALREAAVLYKPAVSTKTVKGEFRLEIEEKKEERKLRMPYDVPEPRKYKQTTIEEDQRIKQFVPMSDMKWYKKIRDQYEMPGKLDRVVQKRPKRIRLSRWEQFYVMPLPRITDQYRPKWRIPKLSQDDLEIVRPARRRTPSPDYDFYYRPRRRSLGDISDEELLLPIDDYLAMKRTEEERLRLEEELELGFSASPPSRSPPHFELSSLRYSSPQAHVKVEETRKDFRYSTYHIPTKAEASTSYAELRERHAQAAYRQPKQRQRIMAEREDEELLRPVTTTQHLSEYKSELDFMSKEEKSRKKSRRQREVTEITEIEEEYEISKHAQRESSSSASRLLRRRRSLSPTYIELMRPVSELIRSRPQPAEEYEDDTERRSPTPERTRPRSPSPVSSERSLSRFERSARFDIFSRYESMKAALKTQKTSERKYEVLSQQPFTLDHAPRITLRMRSHRVPCGQNTRFILNVQSKPTAEVKWYHNGVELQESSKIHYTNTSGVLTLEILDCHTDDSGTYRAVCTNYKGEASDYATLDVTGGDYTTYASQRRDEEVPRSVFPELTRTEAYAVSSFKKTSEMEASSSVREVKSQMTETRESLSSYEHSASAEMKSAALEEKSLEEKSTTRKIKTTLAARILTKPRSMTVYEGESARFSCDTDGEPVPTVTWLRKGQVLSTSARHQVTTTKYKSTFEISSVQASDEGNYSVVVENSEGKQEAEFTLTIQKARVTEKAVTSPPRVKSPEPRVKSPEAVKSPKRVKSPEPSHPKAVSPTETKPTPTEKVQHLPVSAPPKITQFLKAEASKEIAKLTCVVESSVLRAKEVTWYKDGKKLKENGHFQFHYSADGTYELKINNLTESDQGEYVCEISGEGGTSKTNLQFMGQAFKSIHEKVSKISETKKSDQKTTESTVTRKTEPKAPEPISSKPVIVTGLQDTTVSSDSVAKFAVKATGEPRPTAIWTKDGKAITQGGKYKLSEDKGGFFLEIHKTDTSDSGLYTCTVKNSAGSVSSSCKLTIKAIKDTEAQKVSTQKTSEITPQKKAVVQEEISQKALRSEEIKMSEAKSQEKLALKEEASKVLISEEVKKSAATSLEKSIVHEEITKTSQASEEVRTHAEIKAFSTQMSINEGQRLVLKANIAGATDVKWVLNGVELTNSEEYRYGVSGSDQTLTIKQASHRDEGILTCISKTKEGIVKCQYDLTLSKELSDAPAFISQPRSQNINEGQNVLFTCEISGEPSPEIEWFKNNLPISISSNVSISRSRNVYSLEIRNASVSDSGKYTIKAKNFRGQCSATASLMVLPLVEEPSREVVLRTSGDTSLQGSFSSQSVQMSASKQEASFSSFSSSSASSMTEMKFASMSAQSMSSMQESFVEMSSSSFMGISNMTQLESSTSKMLKAGIRGIPPKIEALPSDISIDEGKVLTVACAFTGEPTPEVTWSCGGRKIHSQEQGRFHIENTDDLTTLIIMDVQKQDGGLYTLSLGNEFGSDSATVNIHIRSI

SEQ ID NO: 72 - protein, 534 aa, Homo sapiens
MPHLMERMVGSGLLWLALVSCILTQASAVQRGYGNPIEASSYGLDLDCGAPGTPEAHVCFDPCQNYTLLDEPFRSTENSAGSQGCDKNMSGWYRFVGEGGVRMSETCVQVHRCQTDAPMWLNGTHPALGDGITNHTACAHWSGNCCFWKTEVLVKACPGGYHVYRLEGTPWCNLRYCTDPSTVEDKCEKACRPEEECLALNSTWGCFCRQDLNSSDVHSLQPQLDCGPREIKVKVDKCLLGGLGLGEEVIAYLRDPNCSSILQTEERNWVSVTSPVQASACRNILERNQTHAIYKNTLSLVNDFIIRDTILNINFQCAYPLDMKVSLQAALQPIVSSLNVSVDGNGEFIVRMALFQDQNYTNPYEGDAVELSVESVLYVGAILEQGDTSRFNLVLRNCYATPTEDKADLVKYFIIRNSCSNQRDSTIHVEENGQSSESRFSVQMFMFAGHYDLVFLHCEIHLCDSLNEQCQPSCSRSQVRSEVPAIDLARVLDLGPITRRGAQSPGVMNGTPSTAGFLVAWPMVLLTVLLAWLF

SEQ ID NO: 73 - protein, 2633 aa, Homo sapiens
MPVTEKDLAEDAPWKKIQQNTFTRWCNEHLKCVNKRIGNLQTDLSDGLRLIALLEVLSQKRMYRKYHQRPTFRQMQLENVSVALEFLDRESIKLVSIDSKAIVDGNLKLILGLVWTLILHYSISMPVWEDEGDDDAKKQTPKQRLLGWIQNKIPYLPITNFNQNWQDGKALGALVDSCAPGLCPDWESWDPQKPVDNAREAMQQADDWLGVPQVITPEEIIHPDVDEHSVMTYLSQFPKAKLKPGAPLKPKLNPKKARAYGRGIEPTGNMVKQPAKFTVDTISAGQGDVMVFVEDPEGNKEEAQVTPDSDKNKTYSVEYLPKVTGLHKVTVLFAGQHISKSPFEVSVDKAQGDASKVTAKGPGLEAVGNIANKPTYFDIYTAGAGVGDIGVEVEDPQGKNTVELLVEDKGNQVYRCVYKPMQPGPHVVKIFFAGDTIPKSPFVVQVGEACNPNACRASGRGLQPKGVRIRETTDFKVDTKAAGSGELGVTMKGPKGLEELVKQKDFLDGVYAFEYYPSTPGRYSIAITWGGHHIPKSPFEVQVGPEAGMQKVRAWGPGLHGGIVGRSADFVVESIGSEVGSLGFAIEGPSQAKIEYNDQNDGSCDVKYWPKEPGEYAVHIMCDDEDIKDSPYMAFIHPATGGYNPDLVRAYGPGLEKSGCIVNNLAEFTVDPKDAGKAPLKIFAQDGEGQRIDIQMKNRMDGTYACSYTPVKAIKHTIAVVWGGVNIPHSPYRVNIGQGSHPQKVKVFGPGVERSGLKANEPTHFTVDCTEAGEGDVSVGIKCDARVLSEDEEDVDFDIIHNANDTFTVKYVPPAAGRYTIKVLFASQEIPASPFRVKVDPSHDASKVKAEGPGLSKAGVENGKPTHFTVYTKGAGKAPLNVQFNSPLPGDAVKDLDIIDNYDYSHTVKYTPTQQGNMQVLVTYGGDPIPKSPFTVGVAAPLDLSKIKLNGLENRVEVGKDQEFTVDTRGAGGQGKLDVTILSPSRKVVPCLVTPVTGRENSTAKFIPREEGLYAVDVTYDGHPVPGSPYTVEASLPPDPSKVKAHGPGLEGGLVGKPAEFTIDTKGAGTGGLGLTVEGPCEAKIECSDNGDGTCSVSYLPTKPGEYFVNILFEEVHIPGSPFKADIEMPFDPSKVVASGPGLEHGKVGEAGLLSVDCSEAGPGALGLEAVSDSGTKAEVSIQNNKDGTYAVTYVPLTAGMYTLTMKYGGELVPHFPARVKVEPAVDTSRIKVFGPGIEGKDVFREATTDFTVDSRPLTQVGGDHIKAHIANPSGASTECFVTDNADGTYQVEYTPFEKGLHVVEVTYDDVPIPNSPFKVAVTEGCQPSRVQAQGPGLKEAFTNKPNVFTVVTRGAGIGGLGITVEGPSESKINCRDNKDGSCSAEYIPFAPGDYDVNITYGGAHIPGSPFRVPVKDVVDPSKVKIAGPGLGSGVRARVLQSFTVDSSKAGLAPLEVRVLGPRADDTDSQSWRSPLKALSEFFKGDPKGDFNKTGLVEPVNVVDNGDGTHTVTYTPSQEGPYMVSVKYADEEIPRSPFKVKVLPTYDASKVTASGPGLSSYGVPASLPVDFAIDARDAGEGLLAVQITDQEGKPKRAIVHDNKDGTYAVTYIPDKTGRYMIGVTYGGDDIPLSPYRIRATQTGDASKCLATGPGIASTVKTGEEVGFVVDAKTAGKGKVTCTVLTPDGTEAEADVIENEDGTYDIFYTAAKPGTYVIYVRFGGVDIPNSPFTVMATDGEVTAVEEAPVNACPPGFRPWVTEEAYVPVSDMNGLGFKPFDLVIPFAVRKGEITGEVHMPSGKTATPEIVDNKDGTVTVRYAPTEVGLHEMHIKYMGSHIPESPLQFYVNYPNSGSVSAYGPGLVYGVANKTATFTIVTEDAGEGGLDLAIEGPSKAEISCIDNKDGTCTVTYLPTLPGDYSILVKYNDKHIPGSPFTAKITDDSRRCSQVKLGSAADFLLDISETDLSSLTASIKAPSGRDEPCLLKRLPNNHIGISFIPREVGEHLVSIKKNGNHVANSPVSIMVVQSEIGDARRAKVYGRGLSEGRTFEMSDFIVDTRDAGYGGISLAVEGPSKVDIQTEDLEDGTCKVSYFPTVPGVYIVSTKFADEHVPGSPFTVKISGEGRVKESITRTSRAPSVATVGSICDLNLKIPEINSSDMSAHVTSPSGRVTEAEIVPMGKNSHCVRFVPQEMGVHTVSVKYRGQHVTGSPFQFTVGPLGEGGAHKVRAGGPGLERGEAGVPAEFSIWTREAGAGGLSIAVEGPSKAEITFDDHKNGSCGVSYIAQEPGNYEVSIKFNDEHIPESPYLVPVIAPSDDARRLTVMSLQESGLKVNQPASFAIRLNGAKGKIDAKVHSPSGAVEECHVSELEPDKYAVRFIPHENGVHTIDVKFNGSHVVGSPFKVRVGEPGQAGNPALVSAYGTGLEGGTTGIQSEFFINTTRAGPGTLSVTIEGPSKVKMDCQETPEGYKVMYTPMAPGNYLISVKYGGPNHIVGSPFKAKVTGQRLVSPGSANETSSILVESVTRSSTETCYSAIPKASSDASKVTSKGAGLSKAFVGQKSSFLVDCSKAGSNMLLIGVHGPTTPCEEVSMKHVGNQQYNVTYVVKERGDYVLAVKWGEEHIPGSPFHVTVP

SEQ ID NO: 74 - protein, 159 aa, Homo sapiens
MKNHLLFWGVLAVFIKAVHVKAQEDERIVLVDNKCKCARITSRIIRSSEDPNEDIVERNIRIIVPLNNRENISDPTSPLRTRFVYHLSDLCKKCDPTEVELDNQIVTATQSNICDEDSATETCYTYDRNKCYTAVVPLVYGGETKMVETALTPDACYPD

SEQ ID NO: 75 - protein, 147 aa, Homo sapiens
MASHRLLLLCLAGLVFVSEAGPTGTGESKCPLMVKVLDAVRGSPAINVAVHVFRKAADDTWEPFASGKTSESGELHGLTTEEEFVEGIYKVEIDTKSYWKALGISPFHEHAEVVFTANDSGPRRYTIAALLSPYSYSTTAVVTNPKE

SEQ ID NO: 76 - protein, 330 aa, Homo sapiens [sequence omitted]

SEQ ID NO: 77 - protein, 7968 aa, Homo sapiens
MDQPQFSGAPRFLTRPKAFVVSVGKDATLSCQIVGNPTPQVSWEKDQQPVAAGARFRLAQDGDLYRLTILDLALGDSGQYVCRARNAIGEAFAAVGLQVDAEAACAEQAPHFLLRPTSIRVREGSEATFRCRVGGSPRPAVSWSKDGRRLGEPDGPRVRVEELGEASALRIRAARPRDGGTYEVRAENPLGAASAAAALVVDSDAADTASRPGTSTAALLAHLQRRREAMRAEGAPASPPSTGTRTCTVTEGKHARLSCYVTGEPKPETVWKKDGQLVTEGRRHVVYEDAQENFVLKILFCKQSDRGLYTCTASNLVGQTYSSVLVVVREPAVPFKKRLQDLEVREKESATFLCEVPQPSTEAAWFKEETRLWASAKYGIEEEGTERRLTVRNVSADDDAVYICETPEGSRTVAELAVQGNLLRKLPRKTAVRVGDTAMFCVELAVPVGPVHWLRNQEEVVAGGRVAISAEGTRHTLTISQCCLEDVGQVAFMAGDCQTSTQFCVSAPRKPPLQPPVDPVVKARMESSVILSWSPPPHGERPVTIDGYLVEKKKLGTYTWIRCHEAEWVATPELTVADVAEEGNFQFRVSALNSFGQSPYLEFPGTVHLAPKLAVRTPLKAVQAVEGGEVTFSVDLTVASAGEWFLDGQALKASSVYEIHCDRTRHTLTIREVPASLHGAQLKFVANGIESSIRMEVRAAPGLTANKPPAAAAREVLARLHEEAQLLAELSDQAAAVTWLKDGRTLSPGPKYEVQASAGRRVLLVRDVARDDAGLYECVSRGGRIAYQLSVQGLARFLHKDMAGSCVDAVAGGPAQFECETSEAHVHVHWYKDGMELGHSGERFLQEDVGTRHRLVAATVTRQDEGTYSCRVGEDSVDFRLRVSEPKVVFAKEQLARRKLQAEAGASATLSCEVAQAQTEVTWYKDGKKLSSSSKVCMEATGCTRRLVVQQAGQADAGEYSCEAGGQRLSFHLDVKEPKVVFAKDQVAHSEVQAEAGASATLSCEVAQAQTEVMWYKDGKKLSSSLKVHVEAKGCRRRLVVQQAGKTDAGDYSCEARGQRVSFRLHITEPKMMFAKEQSVHNEVQAEAGASAMLSCEVAQAQTEVTWYKDGKKLSSSSKVGMEVKGCTRRLVLPQAGKADAGEYSCEAGGQRVSFHLHITEPKGVFAKEQSVHNEVQAEAGTTAMLSCEVAQPQTEVTWYKDGKKLSSSSKVRMEVKGCTRRLVVQQVGKADAGEYSCEAGGQRVSFQLHITEPKAVFAKEQLVHNEVRTEAGASATLSCEVAQAQTEVTWYKDGKKLSSSSKVRIEAAGCMRQLVVQQAGQADAGEYTCEAGGQRLSFHLDVSEPKAVFAKEQLAHRKVQAEAGAIATLSCEVAQAQTEVTWYKDGKKLSSSSKVRMEAVGCTRRLVVQQACQADTGEYSCEAGGQRLSFSLDVAEPKVVFAKEQPVHREVQAQAGASTTLSCEVAQAQTEVMWYKDGKKLSFSSKVRMEAVGCTRRLVVQQAGQAVAGEYSCEAGSQRLSFHLHVAEPKAVFAKEQPASREVQAEAGTSATLSCEVAQAQTEVTWYKDGKKLSSSSKVRMEAVGCTRRLVVQEAGQADAGEYSCKAGDQRLSFHLHVAEPKVVFAKEQPAHREVQAEAGASATLSCEVAQAQTEVTWYKDGKKLSSSSKVRVEAVGCTRRLVVQQAGQADAGEYSCEAGGQRLSFRLHVAELEPQISERPCRREPLVVKEHEDIILTATLATPSAATVTWLKDGVEIRRSKRHETASQGDTHTLTVHGAQVLDSAIYSCRVGAEGQDFPVQVEEVAAKFCRLLEPVCGELGGTVTLACELSPACAEVVWRCGNTQLRVGKRFQMVAEGPVRSLTVLGLRAEDAGEYVCESRDDHTSAQLTVSVPRVVKFMSGLSTVVAEEGGEATFQCVVSPSDVAVVWFRDGALLQPSEKFAISQSGASHSLTISDLVLEDAGQITVEAEGASSSAALRVREAPVLFKKKLEPQTVEERSSVTLEVELTRPWPELRWTRNATALAPGKNVEIHAEGARHRLVLHNVGFADRGFFGCETPDDKTQAKLTVEMRQVRLVRGLQAVEAREQGTATMEVQLSHADVDGSWTRDGLRFQQGPTCHLAVRGPMHTLTLSGLRPEDSGLMVFKAEGVHTSARLVVTELPVSFSRPLQDVVTTEKEKVTLECELSRPNVDVRWLKDGVELRAGKTMAIAAQGACRSLTIYRCEFADQGVYVCDAHDAQSSASVKVQGRTYTLIYRRVLAEDAGEIQFVAENAESRAQLRVKELPVTLVRPLRDKIAMEKHRGVLECQVSRASAQVRWFKGSQELQPGPKYELVSDGLYRKLIISDVHAEDEDTYTCDAGDVKTSAQFFVEEQSITIVRGLQDVTVMEPAPAWFECETSIPSVRPPKWLLGKTVLQAGGNVGLEQEGTVHRLMLRRTCSTMTGPVHFTVGKSRSSARLVVSDIPVVLTRPLEPKTGRELQSVVLSCDFRPAPKAVQWYKDDTPLSPSEKFKMSLEGQMAELRILRLMPADAGVYRCQAGSAHSSTEVTVEAREVTVTGPLQDAEATEEGWASFSCELSHEDEEVEWSLNGMPLYNDSFHEISHKGRRHTLVLKSIQRADAGIVRASSLKVSTSARLEVRVKPVVFLKALDDLSAEERGTLALQCEVSDPEAHVVWRKDGVQLGPSDKYDFLHTAGTRGLVVHDVSPEDAGLYTCHVGSEETRARVRVHDLHVGITKRLKTMEVLEGESCSFECVLSHESASDPAMWTVGGKTVGSSSRFQATRQGRKYILVVREAAPSDAGEVVFSVRGLTSKASLIVRERPAAIIKPLEDQWVAPGEDVELRCELSRAGTPVHWLKDRKAIRKSQKYDVVCEGTMAMLVIRGASLKDAGEYTCEVEASKSTASLHVEEKANCFTEELTNLQVEEKGTAVFTCKTEHPAATVTWRKGLLELRASGKHQPSQEGLTLRLTISALEKADSDTYTCDIGQAQSRAQLLVQGRRVHIIEDLEDVDVQEGSSATFRCRISPANYEPVHWFLDKTPLHANELNEIDAQPGGYHVLTLRQLALKDSGTIYFEAGDQRASAALRVTEKPSVFSRELTDATITEGEDLTLVCETSTCDIPVCWTKDGKTLRGSARCQLSHEGHRAQLLITGATLQDSGRYKCEAGGACSSSIVRVHARPVRFQEALKDLEVLEGGAATLRCVLSSVAAPVKWCYGNNVLRPGDKYSLRQEGAMLELVVRNLRPQDSGRYSCSFGDQTTSATLTVTALPAQFIGKLRNKEATEGATATLRCELSKAAPVEWRKGSETLRDGDRYCLRQDGAMCELQIRGLAMVDAAEYSCVCGEERTSASLTIRPMPAHFIGRLRHQESIEGATATLRCELSKAAPVEWRKGRESLRDGDRHSLRQDGAVCELQICGLAVADAGEYSCVCGEERTSATLTVKALPAKFTEGLRNEEAVEGATAMLWCELSKVAPVEWRKGPENLRDGDRYILRQEGTRCELQICGLAMADAGEYLCVCGQERTSATLTIRALPARFIEDVKNQEAREGATAVLQCELNSAAPVEWRKGSETLRDGDRYSLRQDGTKCELQIRGLAMADTGEYSCVCGQERTSAMLTVRALPIKFTEGLRNEEATEGATAVLRCELSKMAPVEWWKGHETLRDGDRHSLRQDGARCELQIRGLVAEDAGEYLCMCGKERTSAMLTVRAMPSKFIEGLRNEEATEGDTATLWCELSKAAPVEWRKGHETLRDGDRHSLRQDGSRCELQIRGLAVVDAGEYSCVCGQERTSATLTVRALPARFIEDVKNQEAREGATAVLQCELSKAAPVEWRKGSETLRGGDRYSLRQDGTRCELQIHGLSVADTGEYSCVCGQERTSATLTVRAPQPVFREPLQSLQAEEGSTATLQCELSEPTATVVWSKGGLQLQANGRREPRLQGCTAELVLQDLQREDTGEYTCTCGSQATSATLTVTAAPVRFLRELQHQEVDEGGTAHLCCELSRAGASVEWRKGSLQLFPCAKYQMVQDGAAAELLVRGVEQEDAGDYTCDTGHTQSMASLSVRVPRPKFKTRLQSLEQETGDIARLCCQLSDAESGAVVQWLKEGVELHAGPKYEMRSQGATRELLIHQLEAKDTGEYACVTGGQKTAASLRVTEPEVTIVRGLVDAEVTADEDVEFSCEVSRAGATGVQWCLQGLPLQSNEVTEVAVRDGRIHTLRLKGVTPEDAGTVSFHLGNHASSAQLTVRAPEVTILEPLQDVQLSEGQDASFQCRLSRASGQEARWALGGVPLQANEMNDITVEQGTLHLLTLHKVTLEDAGTVSFHVGTCSSEAQLKVTAKNTVVRGLENVEALEGGEALFECQLSQPEVAAHTWLLDDEPVHTSENAEVVFFENGLRHLLLLKNLRPQDSCRVTFLAGDMVTSAFLTVRGWRLEILEPLKNAAVRAGAQACFTCTLSEAVPVGEASWYINGAAVQPDDSDWTVTADGSHHALLLRSAQPHHAGEVTFACRDAVASARLTVLGLPDPPEDAEVVARSSHTVTLSWAAPMSDGGGGLCGYRVEVKEGATGQWRLCHELVPGPECVVDGLAPGETYRFRVAAVGPVGAGEPVHLPQTVRLAEPPKPVPPQPSAPESRQVAAGEDVSLELEVVAEAGEVIWHKGMERIQPGGRFEVVSQGRQQMLVIKGFTAEDQGEYHCGLAQGSICPAAATFQVALSPASVDEAPQPSLPPEAAQEGDLHLLWEALARKRRMSREPTLDSISELPEEDGRSQRLPQEAEEVAPDLSEGYSTADELARTGDADLSHTSSDDESRAGTPSLVTYLKKAGRPGTSPLASKVGAPAAPSVKPQQQQEPLAAVRPPLGDLSTKDLGDPSMDKAAVKIQAAFKGYKVRKEMKQQEGPMFSHTFGDTEAQVGDALRLECVVASKADVRARWLKDGVELTDGRHHHIDQLGDGTCSLLITGLDRADAGCYTCQVSNKFGQVTHSACVVVSGSESEAESSSGGELDDAFRRAARRLHRLFRTKSPAEVSDEELFLSADEGPAEPEEPADWQTYREDEHFICIRFEALTEARQAVTRFQEMFATLGIGVEIKLVEQGPRRVEMCISKETPAPVVPPEPLPSLLTSDAAPVFLTELQNQEVQDGYPVSFDCVVTGQPMPSVRWFKDGKLLEEDDHYMINEDQQGGHQLIITAVVPADMGVYRCLAENSMGVSSTKAELRVDLTSTDYDTAADATESSSYFSAQGYLSSREQEGTESTTDEGQLPQVVEELRDLQVAPGTRLAKFQLKVKGYPAPRLYWFKDGQPLTASAHIRMTDKKILHTLEIISVTREDSGQYAAYISNAMGAAYSSARLLVRGPDEPEEKPASDVHEQLVPPRMLERFTPKKVKKGSSITFSVKVEGRPVPTVHWLREEAERGVLWIGPDTPGYTVASSAQQHSLVLLDVGRQHQGTYTCIASNAAGQALCSASLHVSGLPKVEEQEKVKEALISTFLQGTTQAISAQGLETASFADLGGQRKEEPLAAKEALGHLSLAEVGTEEFLQKLTSQITEMVSAKITQAKLQVPGGDSDEDSKTPSASPRHGRSRPSSSIQESSSESEDGDARGEIFDIYVVTADYLPLGAEQDAITLREGQYVEVLDAAHPLRWLVRTKPTKSSPSRQGWVSPAYLDRRLKLSPEWGAAEAPEFPGEAVSEDEYKARLSSVIQELLSSEQAFVEELQFLQSHHLQHLERCPHVPIAVAGQKAVIFRNVRDIGRFHSSFLQELQQCDTDDDVAMCFIKNQAAFEQYLEFLVGRVQAESVVVSTAIQEFYKKYAEEALLAGDPSQPPPPPLQHYLEQPVERVQRYQALLKELIRNKARNRQNCALLEQAYAVVSALPQRAENKLHVSLMENYPGTLQALGEPIRQGHFIVWEGAPGARMPWKGHNRHVFLFRNHLVICKPRRDSRTDTVSYVFRNMMKLSSIDLNDQVEGDDRAFEVWQEREDSVRKYLLQARTAIIKSSWVKEICGIQQRLALPVWRPPDFEEELADCTAELGETVKLACRVTGTPKPVISWYKDGKAVQVDPHHILIEDPDGSCALILDSLTGVDSGQYMCFAASAAGNCSTLGKILVQVPPRFVNKVRASPFVEGEDAQFTCTIEGAPYPQIRWYKDGALLTTGNKFQTLSEPRSGLLVLVIRAASKEDLGLYECELVNRLGSARASAELRIQSPMLQAQEQCHREQLVAAVEDTTLERADQEVTSVLKRLLGPKAPGPSTGDLTGPGPCPRGAPALQETGSQPPVTGTSEAPAVPPRVPQPLLHEGPEQEPEAIARAQEWTVPIRMEGAAWPGAGTGELLWDVHSHVVRETTQRTYTYQAIDTHTARPPSMQVTIEDVQAQTGGTAQFEAIIEGDPQPSVTWYKDSVQLVDSTRLSQQQEGTTYSLVLRHVASKDAGVYTCLAQNTGGQVLCKAELLVLGGDNEPDSEKQSHRRKLHSFYEVKEEIGRGVFGFVKRVQHKGNKILCAAKFIPLRSRTRAQAYRERDILAALSHPLVTGLLDQFETRKTLILILELCSSEELLDRLYRKGVVTEAEVKVYIQQLVEGLHYLHSHGVLHLDIKPSNILMVHPAREDIKICDFGFAQNITPAELQFSQYGSPEFVSPEIIQQNPVSEASDIWAMGVISYLSLTCSSPFAGESDRATLLNVLEGRVSWSSPMAAHLSEDAKDFIKATLQRAPQARPSAAQCLSHPWFLKSMPAEEAHFINTKQLKFLLARSRWQRSLMSYKSILVMRSIPELLRGPPDSPSLGVARHLCRDTGGSSSSSSSSDNELAPFARAKSLPPSPVTHSPLLHPRGFLRPSASLPEEAEASERSTEAPAPPASPEGAGPPAAQGCVPRHSVIRSLFYHQAGESPEHGALAPGSRRHPARRRHLLKGGYIAGALPGLREPLMEHRVLEEEAAREEQATLLAKAPSFETALRLPASGTHLAPGHSHSLEHDSPSTPRPSSEACGEAQRLPSAPSGGAPIRDMGHPQGSKQLPSTGGHPGTAQPERPSPDSPWGQPAPFCHPKQGSAPQEGCSPHPAVAPCPPGSFPPGSCKEAPLVPSSPFLGQPQAPPAPAKASPPLDSKMGPGDISLPGRPKPGPCSSPGSASQASSSQVSSLRVGSSQVGTEPGPSLDAEGWTQEAEDLSDSTPTLQRPQEQATMRKFSLGGRGGYAGVAGYGTFAFGGDAGGMLGQGPMWARIAWAVSQSEEEEQEEARAESQSEEQQEARAESPLPQVSARPVPEVGRAPTRSSPEPTPWEDIGQVSLVQIRDLSGDAEAADTISLDISEVDPAYLNLSDLYDIKYLPFEFMIFRKVPKSAQPEPPSPMAEEELAEFPEPTWPWPGELGPHAGLEITEESEDVDALLAEAAVGRKRKWSSPSRSLFHFPGRHLPLDEPAELGLRERVKASVEHISRILKGRPEGLEKEGPPRKKPGLASFRLSGLKSWDRAPTFLRELSDETVVLGQSVTLACQVSAQPAAQATWSKDGAPLESSSRVLISATLKNFQLLTILVVVAEDLGVYTCSVSNALGTVTTTGVLRKAERPSSSPCPDIGEVYADGVLLVWKPVESYGPVTYIVQCSLEGGSWTTLASDIFDCCYLTSKLSRGGTYTFRTACVSKAGMGPYSSPSEQVLLGGPSHLASEEESQGRSAQPLPSTKTFAFQTQIQRGRFSVVRQCWEKASGRALAAKIIPYHPKDKTAVLREYEALKGLRHPHLAQLHAAYLSPRHLVLILELCSGPELLPCLAERASYSESEVKDYLWQMLSATQYLHNQHILHLDLRSENMIITEYNLLKVVDLGNAQSLSQEKVLPSDKFKDYLETMAPELLEGQGAVPQTDIWAIGVTAFIMLSAEYPVSSEGARDLQRGLRKGLVRLSRCYAGLSGGAVAFLRSTLCAQPWGRPCASSCLQCPWLTEEGPACSRPAPVTFPTARLRVFVRNREKRRALLYKRHNLAQVR

SEQ ID NO: 78 - protein, 5635 aa, Homo sapiens
MISWEVVHTVFLFALLYSSLAQDASPQSEIRAEEIPEGASTLAFVFDVTGSMYDDLVQVIEGASKILETSLKRPKRPLFNFALVPFHDPEIGPVTITTDPKKFQYELRELYVQGGGDCPEMSIGAIKIALEISLPGSFIYVFTDARSKDYRLTHEVLQLIQQKQSQVVFVLTGDCDDRTHIGYKVYEEIASTSSGQVFHLDKKQVNEVLKWVEEAVQASKVHLLSTDHLEQAVNTWRIPFDPSLKEVTVSLSGPSPMIEIRNPLGKLIKKGFGLHELLNIHNSAKVVNVKEPEAGMWTVKTSSSGRHSVRITGLSTIDFRAGFSRKPTLDFKKTVSRPVQGIPTYVLLNTSGISTPARIDLLELLSISGSSLKTIPVKYYPHRKPYGIWNISDFVPPNEAFFLKVTGYDKDDYLFQRVSSVSFSSIVPDAPKVTMPEKTPGYYLQPGQIPCSVDSLLPFTLSFVRNGVTLGVDQYLKESASVNLDIAKVTLSDEGFYECIAVSSAGTGRAQTFFDVSEPPPVIQVPNNVTVTPGERAVLTCLIISAVDYNLTWQRNDRDVRLAEPARIRTLANLSLELKSVKFNDAGEYHCMVSSEGGSSAASVFLTVQEPPKVTVMPKNQSFTGGSEVSIMCSATGYPKPKIAWTVNDMFIVGSHRYRMTSDGTLFIKNAAPKDAGIYGCLASNSAGTDKQNSTLRYIEAPKLMVVQSELLVALGDITVMECKTSGIPPPQVKWFKGDLELRPSTFLIIDPLLGLLKIQETQDLDAGDYTCVAINEAGRATGKITLDVGSPPVFIQEPADVSMEIGSNVTLPCYVQGYPEPTIKWRRLDNMPIFSRPFSVSSISQLRTGALFILNLWASDKGTYICEAENQFGKIQSETTVTVTGLVAPLIGISPSVANVIEGQQLTLPCTLLAGNPIPERRWIKNSAMLLQNPYITVRSDGSLHIERVQLQDGGEYTCVASNVAGTNNKTTSVVVHVLPTIQHGQQILSTIEGIPVTLPCKASGNPKPSVIWSKKGELISTSSAKFSAGADGSLYVVSPGGEESGEYVCTATNTAGYAKRKVQLTVYVRPRVFGDQRGLSQDKPVEISVLAGEEVTLPCEVKSLPPPIITWAKETQLISPFSPRHTFLPSGSMKITETRTSDSGMYLCVATNIAGNVTQAVKLNVHVPPKIQRGPKHLKVQVGQRVDIPCNAQGTPLPVITWSKGGSTMLVDGEHHVSNPDGTLSIDQATPSDAGIYTCVATNIAGTDETEITLHVQEPPTVEDLEPPYNTTFQERVANQRIEFPCPAKGTPKPTIKWLHNGRELTGREPGISILEDGTLLVIASVTPYDNGEYICVAVNEAGTTERKYNLKVHVPPVIKDKEQVTNVSVLLNQLTNLFCEVEGTPSPIIMWYKDNVQVTESSTIQTVNNGKILKLFRATPEDAGRYSCKAINIAGTSQKYFNIDVLVPPTIIGTNFPNEVSVVLNRDVALECQVKGTPFPDIHWFKDGKPLFLGDPNVELLDRGQVLHLKNARRNDKGRYQCTVSNAAGKQAKDIKLTIYIPPSIKGGNVTTDISVLINSLIKLECETRGLPMPAITWYKDGQPIMSSSQALYIDKGQYLHIPRAQVSDSATYTCHVANVAGTAEKSFHVDVYVPPMIEGNLATPLNKQVVIAHSLTLECKAAGNPSPILTWLKDGVPVKANDNIRIEAGGKKLEIMSAQEIDRGQYICVATSVAGEKEIKYEVDVLVPPAIEGGDETSYFIVMVNNLLELDCHVTGSPPPTIMWLKDGQLIDERDGFKILLNGRKLVIAQAQVSNTGLYRCMAANTAGDHKKEFEVTVHVPPTIKSSGLSERVVVKYKPVALQCIANGIPNPSITWLKDDQPVNTAQGNLKIQSSGRVLQIAKTLLEDAGRYTCVATNAAGETQQHIQLHVHEPPSLEDAGKMLNETVLVSNPVQLECKAAGNPVPVITWYKDNRLLSGSTSMTFLNRGQIIDIESAQISDAGIYKCVAINSAGATELFYSLQVHVAPSISGSNNMVAVVVNNPVRLECEARGIPAPSLTWLKDGSPVSSFSNGLQVLSGGRILALTSAQISDTGRYTCVAVNAAGEKQRDIDLRVYVPPNIMGEEQNVSVLISQAVELLCQSDAIPPPTLTWLKDGHPLLKKPGLSISENRSVLKIEDAQVQDTGRYTCEATNVAGKTEKNYNVNIWVPPNIGGSDELTQLTVIEGNLISLLCESSGIPPPNLIWKKKGSPVLTDSMGRVRILSGGRQLQISIAEKSDAALYSCVASNVAGTAKKEYNLQVYIRPTITNSGSHPTEIIVTRGKSISLECEVQGIPPPTVTWMKDGHPLIKAKGVEILDEGHILQLKNIHVSDTGRYVCVAVNVAGMTDKKYDLSVHAPPSIIGNHRSPENISVVEKNSVSLTCEASGIPLPSITWFKDGWPVSLSNSVRILSGGRMLRLMQTTMEDAGQYTCVVRNAAGEERKIFGLSVLVPPHIVGENTLEDVKVKEKQSVTLTCEVTGNPVPEITWHKDGQPLQEDEAHHIISGGRFLQITNVQVPHTGRYTCLASSPAGHKSRSFSLNVFVSPTIAGVGSDGNPEDVTVILNSPTSLVCEAYSYPPATITWFKDGTPLESNRNIRILPGGRTLQILNAQEDNAGRYSCVATNEAGEMIKHYEVKVYIPPIINKGDLWGPGLSPKEVKIKVNNTLTLECEAYAIPSASLSWYKDGQPLKSDDHVNIAANGHTLQIKEAQISDTGRYTCVASNIAGEDELDFDVNIQVPPSFQKLWEIGNMLDTGRNGEAKDVIINNPISLYCETNAAPPPTLTWYKDGHPLTSSDKVLILPGGRVLQIPRAKVEDAGRYTCVAVNEAGEDSLQYDVRVLVPPIIKGANSDLPEEVTVLVNKSALIECLSSGSPAPRNSWQKDGQPLLEDDHHKFLSNGRILQILNTQITDIGRYVCVAENTAGSAKKYFNLNVHVPPSVIGPKSENLTVVVNNFISLTCEVSGFPPPDLSWLKNEQPIKLNTNTLIVPGGRTLQIIRAKVSDGGEYTCIAINQAGESKKKFSLTVYVPPSIKDHDSESLSVVNVREGTSVSLECESNAVPPPVITWYKNGRMITESTHVEILADGQMLHIKKAEVSDTGQYVCRAINVAGRDDKNFHLNVYVPPSIEGPEREVIVETISNPVTLTCDATGIPPPTIAWLKNHKRIENSDSLEVRILSGGSKLQIARSQHSDSGNYTCIASNMEGKAQKYYFLSIQVPPSVAGAEIPSDVSVLLGENVELVCNANGIPTPLIQWLKDGKPIASGETERIRVSANGSTLNIYGALTSDTGKYTCVATNPAGEEDRIFNLNVYVTPTIRGNKDEAEKLMTLVDTSINIECRATGTPPPQINWLKNGLPLPLSSHIRLLAAGQVIRIVRAQVSDVAVYTCVASNRAGVDNKHYNLQVFAPPNMDNSMGTEEITVLKGSSTSMACITDGTPAPSMAWLRDGQPLGLDAHLTVSTHGMVLQLLKAETEDSGKYTCIASNEAGEVSKHFILKVLEPPHINGSEEHEEISVIVNNPLELTCIASGIPAPKMTWMKDGRPLPQTDQVQTLGGGEVLRISTAQVEDTGRYTCLASSPAGDDDKEYLVRVHVPPNIAGTDEPRDITVLRNRQVTLECKSDAVPPPVITWLRNGERLQATPRVRILSGGRYLQINNADLGDTANYTCVASNIAGKTTREFILTVNVPPNIKGGPQSLVILLNKSTVLECIAEGVPTPRITWRKDGAVLAGNHARYSILENGFLHIQSAHVTDTGRYLCMATNAAGTDRRRIDLQVHVPPSIAPGPTNMTVIVNVQTTLACEATGIPKPSINWRKNGHLLNVDQNQNSYRLLSSGSLVIISPSVDDTATYECTVTNGAGDDKRTVDLTVQVPPSIADEPTDFLVTKHAPAVITCTASGVPFPSIHWTKNGIRLLPRGDGYRILSSGAIEILATQLNHAGRYTCVARNAAGSAHRHVTLHVHEPPVIQPQPSELHVILNNPILLPCEATGTPSPFITWQKEGINVNTSGRNHAVLPSGGLQISRAVREDAGTYMCVAQNPAGTALGKIKLNVQVPPVISPHLKEYVIAVDKPITLSCEADGLPPPDITWHKDGRAIVESIRQRVLSSGSLQIAFVQPGDAGHYTCMAANVAGSSSTSTKLTVHVPPRIRSTEGHYTVNENSQAILPCVADGIPTPAINWKKDNVLLANLLGKYTAEPYGELILENVVLEDSGFYTCVANNAAGEDTHTVSLTVHVLPTFTELPGDVSLNKGEQLRLSCKATGIPLPKLTWTFNNNIIPAHFDSVNGHSELVIERVSKEDSGTYVCTAENSVGFVKAIGFVYVKEPPVFKGDYPSNWIEPLGGNAILNCEVKGDPTPTIQWNRKGVDIEISHRIRQLGNGSLAIYGTVNEDAGDYTCVATNEAGVVERSMSLTLQSPPIITLEPVETVINAGGKIILNCQATGEPQPTITWSRQGHSISWDDRVNVLSNNSLYIADAQKEDTSEFECVARNLMGSVLVRVPVIVQVHGGFSQWSAWRACSVTCGKGIQKRSRLCNQPLPANGGKPCQGSDLEMRNCQNKPCPVDGSWSEWSLWEECTRSCGRGNQTRTRTCNNPSVQHGGRPCEGNAVEIIMCNIRPCPVHGAWSAWQPWGTCSESCGKGTQTRARLCNNPPPAFGGSYCDGAETQMQVCNERNCPIHGKWATWASWSACSVSCGGGARQRTRGCSDPVPQYGGRKCEGSDVQSDFCNSDPCPTHGNWSPWSGWGTCSRTCNGGQMRRYRTCDNPPPSNGGRACGGPDSQIQRCNTDMCPVDGSWGSWHSWSQCSASCGGGEKTRKRLCDHPVPVKGGRPCPGDTTQVTRCNVQACPGGPQRARGSVIGNINDVEFGIAFLNATITDSPNSDTRIIRAKITNVPRSLGSAMRKIVSILNPIYWTTAKEIGEAVNGFTLTNAVFKRETQVEFATGEILQMSHIARGLDSDGSLLLDIVVSGYVLQLQSPAEVTVKDYTEDYIQTGPGQLYAYSTRLFTIDGISIPYTWNHTVFYDQAQGRMPFLVETLHASSVESDYNQIEETLGFKIHASISKGDRSNQCPSGFTLDSVGPFCADEDECAAGNPCSHSCHNAMGTYYCSCPKGLTIAADGRTCQDIDECALGRHTCHAGQDCDNTIGSYRCVVRCGSGFRRTSDGLSCQDINECQESSPCHQRCFNAIGSFHCGCEPGYQLKGRKCMDVNECRQNVCRPDQHCKNTRGGYKCIDLCPNGMTKAENGTCIDIDECKDGTHQCRYNQICENTRGSYRCVCPRGYRSQGVGRPCMDINECEQVPKPCAHQCSNTPGSFKCICPPGQHLLGDGKSCAGLERLPNYGTQYSSYNLARFSPVRNNYQPQQHYRQYSHLYSSYSEYRNSRTSLSRTRRTIRKTCPEGSEASHDTCVDIDECENTDACQHECKNTFGSYQCICPPGYQLTHNGKTCQDIDECLEQNVHCGPNRMCFNMRGSYQCIDTPCPPNYQRDPVSGFCLKNCPPNDLECALSPYALEYKLVSLPFGIATNQDLIRLVAYTQDGVMHPRTTFLMVDEEQTVPFALRDENLKGVVYTTRPLREAETYRMRVRASSYSANGTIEYQTTFIVYIAVSAYPY

SEQ ID NO: 79 - protein, 1788 aa, Homo sapiens
MGISTVILEMCLLWGQVLSTGGWIPRTTDYASLIPSEVPLDTTVAEGSPFPSELTLESTVAEGSPISLESTLESTVAEGSLIPSESTLESTVAEGSDSGLALRLVNGDGRCQGRVEILYRGSWGTVCDDSWDTNDANVVCRQLGCGWAMSAPGNAWFGQGSGPIALDDVRCSGHESYLWSCPHNGWLSHNCGHGEDAGVICSAAQPQSTLRPESWPVRISPPVPTEGSESSLALRLVNGGDRCRGRVEVLYRGSWGTVCDDYWDTNDANVVCRQLGCGWAMSAPGNAQFGQGSGPIVLDDVRCSGHESYLWSCPHNGWLTHNCGHSEDAGVICSAPQSRPTPSPDTWPTSHASTAGSESSLALRLVNGGDRCQGRVEVLYRGSWGTVCDDSWDTSDANVVCRQLGCGWATSAPGNARFGQGSGPIVLDDVRCSGYESYLWSCPHNGWLSHNCQHSEDAGVICSAAHSWSTPSPDTLPTITLPASTVGSESSLALRLVNGGDRCQGRVEVLYRGSWGTVCDDSWDTNDANVVCRQLGCGWAMLAPGNARFGQGSGPIVLDDVRCSGNESYLWSCPHNGWLSHNCGHSEDAGVICSALQWLPTPIRPRSWPSSHALQTCKGPESSLALRLVNGGDRCQGRVEVLYRGSWGTVCDDSWDTNDANVVCRQLGCGWATSAPGNARFGQGSGPIVLDDVRCSGHESYLWSCPNNGWLSHNCGHHEDAGVICSAAQSRSTPRPDTWPTSHASTAGSESSLALRLVNGGDRCQGRVEVLYQGSWGTVCDDSWDTNDANVVCRQLGCGWAMSAPGNARFGQGSGPIVLDDVRCSGHESYLWSCPHNGWLSHNCGHSEDAGVICSASQSRPTPSPDTWPTSRASTAGSESTLALRLVNGGDRCRGRVEVLYQGSWGTVCDDYWDTNDANVVCRQLGCGWAMSAPGNAQFGQGSGPIVLDDVRCSGHESYLWSCPHNGWLSHNCGHHEDAGVICSAAQSQSTPRPDTWLTTNLPALTVGSESSLALRLVNGGDRCRGRVEVLYRGSWGTVCDDSWDTNDANVVCRQLGCGWAMSAPGNARFGQGSGPIVLDDVRCSGNESYLWSCPHKGWLTHNCGHHEDAGVICSATQINSTTTDWWHPTTTTTARPSSNCGGFLFYASGTFSSPSYPAYYPNNAKCVWEIEVNSGYRINLGFSNLKLEAHHNCSFDYVEIFDGSLNSSLLLGKICNDTRQIFTSSYNRMTIHFRSDISFQNTGFLAWYNSFPSDATLRLVNLNSSYGLCAGRVEIYHGGTWGTVCDDSWTIQEAEVVCRQLGCGRAVSALGNAYFGSGSGPITLDDVECSGTESTLWQCRNRGWFSHNCNHREDAGVICSGNHLSTPAPFLNITRPNTDYSCGGFLSQPSGDFSSPFYPGNYPNNAKCVWDIEVQNNYRVTVIFRDVQLEGGCNYDYIEVFDGPYRSSPLIARVCDGARGSFTSSSNFMSIRFISDHSITRRGFRAEYYSSPSNDSTNLLCLPNHMQASVSRSYLQSLGFSASDLVISTWNGYYECRPQITPNLVIFTIPYSGCGTFKQADNDTIDYSNFLTAAVSGGIIKRRTDLRIHVSCRMLQNTWVDTMYIANDTIHVANNTIQVEEVQYGNFDVNISFYTSSSFLYPVTSRPYYVDLNQDLYVQAEILHSDAVLTLFVDTCVASPYSNDFTSLTYDLIRSGCVRDDTYGPYSSPSLRIARFRFRAFHFLNRFPSVYLRCKMVVCRAYDPSSRCYRGCVLRSKRDVGSYQEKVDVVLGPIQLQTPPRREEEPR

SEQ ID NO: 80 - protein, 129 aa, Homo sapiens
METPAQLLFLLLLWLPDTTGEIVLTQSPGTLSLSPGERATLSCRASQSVSSSYLAWYQQKPGQAPRLLIYGASSRATGIPDRFSGSGSGTDFTLTISRLEPEDFAVYYCQQYGTSPRTFGQGTKVEIKR

SEQ ID NO: 81 - protein, 4579 aa, Homo sapiens
METKENRWVPVTVLPGCVGCRTVAALASWTVRDVKERIFAETGFPVSEQRLWRGGRELSDWIKIGDLTSKNCHLFVNLQSKGLKGGGRFGQTTPPLVDFLKDILRRYPEGGQILKELIQNAEDAGATEVKFLYDETQYGTETLWSKDMAPYQGPALYVYNNAVFTPEDWHGIQEIARSRKKDDPLKVGRFGIGFNSVYHITDVPCIFSGDQIGMLDPHQTLFGPHESGQCWNLKDDSKEISELSDQFAPFVGIFGSTKETFINGNFPGTFFRFPLRLQPSQLSSNLYNKQKVLELFESFRADADTVLLFLKSVQDVSLYVREADGTEKLVFRVTSSESKALKHERPNSIKILGTAISNYCKKTPSNNITCVTYHVNIVLEEESTKDAQKTSWLVCNSVGGRGISSKLDSLADELKFVPIIGIAMPLSSRDDEAKGATSDFSGKAFCFLPLPPGEESSTGLPVHISGFFGLTDNRRSIKWRELDQWRDPAALWNEFLVMNVVPKAYATLILDSIKRLEMEKSSDFPLSVDVIYKLWPEASKVKVHWQPVLEPLFSELLQNAVIYSISCDWVRLEQVYFSELDENLEYTKTVLNYLQSSGKQIAKVPGNVDAAVQLTAASGTTPVRKVTPAWVRQVLRKCAHLGCAEEKLHLLEFVLSDQAYSELLGLELLPLQNGNFVPFSSSVSDQDVIYITSAEYPRSLFPSLEGRFILDNLKPHLVAALKEAAQTRGRPCTQLQLLNPERFARLIKEVMNTFWPGRELIVQWYPFDENRNHPSVSWLKMVWKNLYIHFSEDLTLFDEMPLIPRTILEEGQTCVELIRLRIPSLVILDDESEAQLPEFLADIVQKLGGFVLKKLDASIQHPLIKKYIHSPLPSAVLQIMEKMPLQKLCNQITSLLPTHKDALRKFLASLTDSSEKEKRIIQELAIFKRINHSSDQGISSYTKLKGCKVLHHTAKLPADLRLSISVIDSSDEATIRLANMLKIEQLKTTSCLKLVLKDIENAFYSHEEVTQLMLWVLENLSSLKNENPNVLEWLTPLKFIQISQEQMVSAGELFDPDIEVLKDLFCNEEGTYFPPSVFTSPDILHSLRQIGLKNEASLKEKDVVQVAKKIEALQVGACPDQDVLLKKAKTLLLVLNKNHTLLQSSEGKMTLKKIKWVPACKERPPNYPGSLVWKGDLCNLCAPPDMCDVGHAILIGSSLPLVESIHVNLEKALGIFTKPSLSAVLKHFKIVVDWYSSKTFSDEDYYQFQHILLEIYGFMHDHLNEGKDSFRALKFPWVWTGKKFCPLAQAVIKPIHDLDLQPYLHNVPKTMAKFHQLFKVCGSIEELTSDHISMVIQKIYLKSDQDLSEQESKQNLHLMLNIIRWLYSNQIPASPNTPVPIHHSKNPSKLIMKPIHECCYCDIKVDDLNDLLEDSVEPIILVHEDIPMKTAEWLKVPCLSTRLINPENMGFEQSGQREPLTVRIKNILEEYPSVSDIFKELLQNADDANATECSFLIDMRRNMDIRENLLDPGMAACHGPALWSFNNSQFSDSDFVNITRLGESLKRGEVDKVGKFGLGFNSVYHITDIPIIMSREFMIMFDPNINHISKHIKDKSNPGIKINWSKQQKRLRKFPNQFKPFIDVFGCQLPLTVEAPYSYNGTLFRLSFRTQQEAKVSEVSSTCYNTADIYSLVDEFSLCGHRLIIFTQSVKSMYLKYLKIEETNPSLAQDTVIIKKKSCSSKALNTPVLSVLKEAAKLMKTCSSSNKKLPSDEPKSSCILQITVEEFHHVFRRIADLQSPLFRGPDDDPAALFEMAKSGQSKKPSDELSQKTVECTTWLLCTCMDTGEALKFSLSESGRRLGLVPCGAVGVQLSEIQDQKWTVKPHIGEVFCYLPLRIKTGLPVHINGCFAVTSNRKEIWKTDTKGRWNTTFMRHVIVKAYLQVLSVLRDLATSGELMDYTYYAVWPDPDLVHDDFSVICQGFYEDIAHGKGKELTKVFSDGSTWVSMKNVRFLDDSILKRRDVGSAAFKIFLKYLKKTGSKNLCAVELPSSVKLGFEEAGCKQILLENTFSEKQFFSEVFFPNIQEIEAELRDPLMIFVLNEKVDEFSGVLRVTPCIPCSLEGHPLVLPSRLIHPEGRVAKLFDIKDGRFPYGSTQDYLNPIILIKLVQLGMAKDDILWDDMLERAVSVAEINKSDHVAACLRSSILLSLIDEKLKIRDPRAKDFAAKYQTIRFLPFLTKPAGFSLDWKGNSFKPETMFAATDLYTAEHQDIVCLLQPILNENSHSFRGCGSVSLAVKEFLGLLKKPTVDLVINQLKEVAKSVDDGITLYQENITNACYKYLHEALMQNEITKMSIIDKLKPFSFILVENAYVDSEKVSFHLNFEAAPYLYQLPNKYKNNFRELFETVGVRQSCTVEDFALVLESIDQERGTKQITEENFQLCRRIISEGIWSLIREKKQEFCEKNYGKILLPDTNLMLLPAKSLCYNDCPWIKVKDTTVKYCHADIPREVAVKLGAVPKRHKALERYASNVCFTTLGTEFGQKEKLTSRIKSILNAYPSEKEMLKELLQNADDAKATEICFVFDPRQHPVDRIFDDKWAPLQGPALCVYNNQPFTEDDVRGIQNLGKGTKEGNPYKTGQYGIGFNSVYHITDCPSFISGNDILCIFDPHARYAPGATSISPGRMFRDLDADFRTQFSDVLDLYLGTHFKLDNCTMFRFPLRNAEMAKVSEISSVPASDRMVQNLLDKLRSDGAELLMFLNHMEKISICEIDKSTGALNVLYSVKGKITDGDRLKRKQFHASVIDSVTKKRQLKDIPVQQITYTMDTEDSEGNLTTWLICNRSGFSSMEKVSKSVISAHKNQDITLFPRGGVAACITHNYKKPHRAFCFLPLSLETGLPFHVNGHFALDSARRNLWRDDNGVGVRSDWNNSLMTALIAPAYVELLIQLKKRYFPGSDPTLSVLQNTPIHVVKDTLKKFLSFFPVNRLDLQPDLYCLVKALYNCIHEDMKRLLPVVRAPNIDGSDLHSAVIITWINMSTSNKTRPFFDNLLQDELQHLKNADYNITTRKTVAENVYRLKHLLLEIGFNLVYNCDETANLYHCLIDADIPVSYVTPADIRSFLMTFSSPDTNCHIGKLPCRLQQTNLKLFHSLKLLVDYCFKDAEENEIEVEGLPLLITLDSVLQTFDAKRPKFLTTYHELIPSRKDLFMNTLYLKYSNILLNCKVAKVFDISSFADLLSSVLPREYKTKSCTKWKDNFASESWLKNAWHFISESVSVKEDQEETKPTFDIVVDTLKDWALLPGTKFTVSANQLVVPEGDVLLPLSLMHIAVFPNAQSDKVFHALMKAGCIQLALNKICSKDSAFVPLLSCHTANIESPTSILKALHYMVQTSTFRAEKLVENDFEALLMYFNCNLNHLMSQDDIKILKSLPCYKSISGRYVSIGKFGTCYVLTKSIPSAEVEKWTQSSSSAFLEEKIHLKELYEVIGCVPVDDLEVYLKHLLPKIENLSYDAKLEHLIYLKNRLSSAEELSEIKEQLFEKLESLLIIHDANSRLKQAKHFYDRTVRVFEVMLPEKLFIPNDFFKKLEQLIKPKNHVTFMTSWVEFLRNIGLKYILSQQQLLQFAKEISVRANTENWSKETLQNTVDILLHHIFQERMDLLSGNFLKELSLIPFLCPERAPAEFIRFHPQYQEVNGTLPLIKFNGAQVNPKFKQCDVLQLLWTSCPILPEKATPLSIKEQEGSDLGPQEQLEQVLNMLNVNLDPPLDKVINNCRNICNITTLDEEMVKTRAKVLRSIYEFLSAEKREFRFQLRGVAFVMVEDGWKLLKPEEVVINLEYESDFKPYLYKLPLELGTFHQLFKHLGTEDIISTKQYVEVLSRIFKNSEGKQLDPNEMRTVKRVVSGLFRSLQNDSVKVRSDLENVRDLALYLPSQDGRLVKSSILVFDDAPHYKSRIQGNIGVQMLVDLSQCYLGKDHGFHTKLIMLFPQKLRPRLLSSILEEQLDEETPKVCQFGALCSLQGRLQLLLSSEQFITGLIRIMKHENDNAFLANEEKAIRLCKALREGLKVSCFEKLQTTLRVKGFNPIPHSRSETFAFLKRFGNAVILLYIQHSDSKDINFLLALAMTLKSATDNLISDTSYLIAMLGCNDIYRIGEKLDSLGVKYDSSEPSKLELPMPGTPIPAEIHYTLLMDPMNVFYPGEYVGYLVDAEGGDIYGSYQPTYTYAIIVQEVEREDADNSSFLGKIYQIDIGYSEYKIVSSLDLYKFSRPEESSQSRDSAPSTPTSPTEFLTPGLRSIPPLFSGRESHKTSSKHQSPKKLKVNSLPEILKEVTSVVEQAWKLPESERKKIIRRLYLKWHPDKNPENHDIANEVFKHLQNEINRLEKQAFLDQNADRASRRTFSTSASRFQSDKYSFQRFYTSWNQEATSHKSERQQQNKEKCPPSAGQTYSQRFFVPPTFKSVGNPVEARRWLRQARANFSAARNDLHKNANEWVCFKCYLSTKLALIAADYAVRGKSDKDVKPTALAQKIEEYSQQLEGLTNDVHTLEAYGVDSLKTRYPDLLPFPQIPNDRFTSEVAMRVMECTACIIIKLENFMQQKV

SEQ ID NO: 82 - protein, 4024 aa, Homo sapiens
MSSEQDKSASKEKSKKPVRFLPQLSMEKLASKEKFKAPARALPQLSMVSTKPHWQQAAPSFHLSVKQDDESPEPFSVKNEQSHAEYMERFGKKGKLPHQVDDSYVGPSTSKSKGKSPHKERENFRSTLVNVIMQQDADLDSAVPDGSTIPKPTASAIEKDILRYYYYIHHGIDTDHVAPMEDSWLEHVLDLVPQHLKVFTDSIVTLSDEMREDYLLSVRKSIVDFVLKDPREKGDDKKTDELPAHRAEMEILPKPWRKSFLAASSYIRDHLNAMNPTMLAVLDLWHTNFKKLRLVDIKEFHNCQDALELSSFQNIIMRHMDSAKETLLKMWFPEVQNIYYQGNKKKQLPTGDSSAKLESFFNCAAALMTLQLQDLTLVSMQDFTDLIAQPPDSVRAFEHPGFIMRLILDNDTIKFEPELSDYIDIFLNVYDVMIKAVSFVPRVETKLYSKWESKSKPTTLKPIILNEIVDAHKEKIKEVIMKESVAPTEHLRLYDKYDFLITRKAERDVDNFLAENHSYEKIIDEICKYQKLIEEIQYTSIKTIRLGMFEMHCEELIRALVKRADIICGKLLAKMFRDHQEVNTRLCDEFERIAEKALSTPPNTAELMEMKAYIQKVEVTDMIELEQRLVDSKNCLAFLIEYVNFSPADMRLNNSVFQWYGRMGEIFEEHRKIIKEKIEQYQEGLKLRCERFVEELESYAKQSEEFYSFGDLQDVQRYLKKAQILNGKLDLAADKIEQFNAEEEAFGWLPSVYPQRKKIQDGLNPYLRLYETAVEFSSNYRAWTEGPYHKVNPDQVEADIGNYWRGLYKLEKTFHDSPYALAMTKKVRSKVEDFKQHIPLIQVICNPGLRPRHWEAMSAIVGYPLQPSDDSTVSSFLDMNLEPYIDRFEGISEAASKEYSLEKAMEKMITEWDAVEFVIHSYRETGTFILASVDEIQMLLDDHIIKTQTMRGSPFIKPYEKQMREWEGKLLLLQEILDEWLKVQATWLYLEPIFSSPDIMSQMPEEGRRFTAVDKTWRDIMRSVMQDKHVLTVVTIDRMLERLKKSNELLELILKGLNEYLEKKRLFFPRFFFLSNDELLEILSETKDPTRVQPHLKKCFEGIAKVEFTETLDITHMKSSEGEVVELIEIISTAKARGQVEKWLVELERVMINSIHKVTGDATFAYTKYERINWVRDWPGQTVLCVSQIFWTKEVQTAIPMGIKALEQYLKTCNRQIDDIVTLVRGKLSMQNRVTLGALVVLDVHARDVLSSLVKKNISDDSDFEWLSQLRYYWQENHLETKMINAGLRYGYEYLGNSPRLVITPLTDRCYRTLFGALHLHLGGAPEGPAGTGKTETTKDLAKAVAKQCVVFNCSDGLDYLALGKFFKGLLSCGAWACFDEFNRIDLEVLSVVAQQILTIQRGINAGADILMFEGTELKLDPTCAVFITMNPGYAGRSELPDNLKALFRTVAMMVPDYAMIAEIVLYSCGFVTARPLSVKIVATYRLCSEQLSSQHHYDYGMRAVKSVLTAAGNLKLKYPNENEEILLLRSIIDVNLPKFLSHDLPLFEGITSDLFPGVKLPKPDYNDLLAAIKDNCASMNLQMTAFFSEKILQVYEMMIVRHGFMIVGEPFGGKTSAYRVLAGALNDICEKGLMEENKVQITVLNPKSVTMGQLYGQFDSVSHEWSDGVLAVSFRAFASSVTPDRKWLIFDGPVDAVWIENMNTVLDDNKKLCLMSGEIIQMSPQMNLIFEPMDLEVASPATVSRCGMIYMEPHMLGWRPLMLSWVNLLPASVSVIQKEFIMGLFDRMVPVSVEFIRKHTKELSPTSDTNLVRSLMNLIDCFMDDFADEVKLKERNDRETYSLLEGIFLFSLIWSVGASCTDDDRLKFNKILRELMESPISDRTRNTFKLQSGTEQTSSKALTVPFPEKGTIYDYQFVTEGIGKWEPWIKKLKEAPPIPKDVMFNEIIVPTLDTIRYSALMELLTTHQKPSIFVGPTGTGKSVYITNFLLNQLNKEIYKPLLINFSAQTTAAQTQNIVMSKLDKRRKGVFGPPLGKRMVVFVDDVNMPAREVYGAQPPIELLRQWLDHWNWYDLKDCSMIKLVDIQIMCAMGPPGGGRNPVTPRYMRHFNIITINEFSDKSMYTIFSRILTWHLEICYKFPDEFLDLTTQIVNGTMTLYKEAMKNLLPTPAKSHYLFNLRDFSRVIQGVCLSRPETTETTEVIKRLWVHEVLRVYYDRLLDNTDRSWLINYIQEILRNYMYEDFHELFQRLDFDNDGMVEADDLRSLMFCDFHDPKREDTNYREIADVDNLRMIVEIHLEEYNNISKKPMNLVLFRFAIEHISRISRILKQPRSHALLVGVGGSGRQSVTRLAAHMADYSVFQVEISKGYDTTEWHEDLKVILRKCAEGEMQGVFLFTDTQIKEESFLEDVSNLLNAGEIPNLFALDEKQEICDKMRQLDRQRDKTKQTDGSPIALFNMFIDHCRSQLHVVLAMSPIGDAFRNRLRKFPALVNCCTIDWFQSWPEDALQAVASRFLEEIEMSEEIRDGCIDMCKSFHTSTIDLSKSFFVELQRYNYVTPTSYLELISTFKLLLEKKRSEVMKMKKRYEVGLEKLDSASSQVATMQMELEALHPQLKVASKEVDEMMIMIEKESVEVAKTEKIVKADETIANEQAMASKAIKDECDADLAGALPILESALAALDTLTAQDITVVKSMKSPPAGVKLVMEAICILKGIKADKIPDPTGSGKKIEDFWGPAKRLLGDMRFLQSLHEYDKDNIPPAYMNIIRKNYIPNPDFVPEKIRNASTAAEGLCKWVIAMDSYDKVAKIVAPKKIKLAAAEGELKIAMDGLRKKQAALKEVQDKLARLQDTLELNKQKKADLENQVDLCSKKLERAEQLIGGLGGEKTRWSHTALELGQLYINLTGDILISSGVVAYLGAFTSTYRQNQTKEWTTLCKGRDIPCSDDCSLMGTLGEAVTIRTWNIAGLPSDSFSIDNGIIIMNARRWPLMIDPQSQANKWIKNMEKANSLYVIKLSEPDYVRTLENCIQFGTPVLLENVGEELDPILEPLLLKQTFKQGGSTCIRLGDSTIEYAPDFRFYITTKLRNPHYLPETSVKVTLLNFMITPEGMQDQLLGIVVAQERPDLEEEKQALILQGAENKRQLKEIEDKILEVLSSSEGNILEDETAIKILSSSKALANEISQKQEVAEETEKKIDTTRMGYRPIAIHSSILFFSLADLANIEPMYQYSLTWFINLFILSIENSEKSEILAKRLQILKDHFTYSLYVNVCRSLFEKDKLLFSFCLTINLLLHERAINKAEWRFLLTGGIGLDNPYANLCTWLPQKSWDEICRLDDLPAFKTIRREFMRLKDGWKKVYDSLEPHHEVFPEEWEDKANEFQRMLIIRCLRPDKVIPMLQEFIINRLGRAFIEPPPFDLAKAFGDSNCCAPLIFVLSPGADPMAALLKFADDQGYGGSKLSSLSLGQGQGPIAMKMLEKAVKEGTWVVLQNCHLATSWMPTLEKVCEELSPESTHPDFRMWLTSYPSPNFPVSVLQNGVKMTNEAPKGLRANIIRSYLMDPISDPEFFGSCKKPEEFKKLLYGLCFFHALVQERRKFGPLGWNIPYEFNETDLRISVQQLHMFLNQYEELPYEALRYMTGECNYGGRVTDDWDRRTLRSILNKFFNPELVENSDYKFDSSGIYFVPPSGDHKSYIEYTKTLPLTPAPEIFGMNANADITKDQSETQLLFDNILLTQSRSAGAGAKSSDEVVNEVASDILGKLPNNFDIEAAMRRYPTTYTQSMNTVLVQEMGRFNKLLKTIRDSCVNIQKAIKGLAVMSTDLEEVVSSILNVKIPEMWMGKSYPSLKPLGSYVNDFLARLKFLQQWYEVGPPPVFWLSGFFFTQAFLTGAQQNYARKYTIPIDLLGFDYEVMEDKEYKHPPEDGVFIHGLFLDGASWNRKIKKLAESHPKILYDTVPVMWLKPCKRADIPKRPSYVAPLYKTSERRGVLSTTGHSTNFVIAMTLPSDQPKEHWIGRGVALLCQLNS

SEQ ID NO: 83 - protein, 6996 aa, Homo sapiens
MKFQLWSSQIRPLGPIFPALRALYALARAAPQEATALLGPLPLEAWNAGGGAEVVGLWPFLVRSGQRDNGVLEKESGAGEEGAEGAVPAMELYLGACSKPAKVAVTKTVASVLAADTQQCRDGVHKTHFAGVGPAQLLDLPLGVKLPVIPGSNAVFYTTNFGEKLFRPSYGFNLTDPYCRLLENQYKSLHDPHLKAYYKRKDILKRLKKGGYITSNNKVVCTLRELNKYRQYLTSLKLDFERNYIKEQRILAKQLHNIPENNQIPQHCDVAQVQNWLLKEGTESIKDQERLMRHRYLDMISRKLEQLERTAEEQRLFLMDREERRQREHTRRKLTLRRKIEEEWKTKEMLLLTRMAEDVKREERIEEQQHRNREESDRKKQDLLEKKMAYHLQKMQDTGFNGEDIGKNTFKYRGQDGTHASPKNKKKTSEDIMLVYPAGDQNTYKETHGHTANAAHQRQNSSNNFTKKNSASVVYQADVQDNGINQKRDGMVSKNSSIFDDRGGINISGQGSIISAQVSPTRNFSRVSQAFLDPSKEEKETNADWDGRPTKRSSYLCESGPQAHATDPGIFSSPVYTNMQQNLLQNCLQEKVTSEELNIIIQNVMTWVVATVTSILYPAITKYEKRLQNNTYPVSDDSILSSDSSSFCSTCSEDFTYRSYTSATTKTFQAEPCAFVVDTSVRRPTTPIKPPPAHVEKTVVGKTCHIKGQSIISKHKYNKTNLLYSYPKLRSCKSDSHLLASFETGTKKSKDATTETDSLGSSLHCDKTAKAMDEMKNLKNVFVNFKCYLKGETEVILESILREIMSDLTQAIPSLSSVTAEVFVEQCEREKEILLSNAHIPSVASEIVENMLEKLESAVEKKCVEMFSQDLSVDIKPSLAASDELLTSSNGKPLKNSMPHTLDPMCDIAEDMVHAILEKLMTLVSFKQNEFLHLKDTNKLSCQQHKTDPICMFLQRAGKNKSSLESDEASLIVNEEVQNLISNIFSQSSLVAYIEEAINAILGYIQTELNNERIIASEETVVLLQLLEDILFQLHQEPVNESFQKSRQPRISSPSDTKEKYRLTGTRLSNSPRSGRPFPPINVPGMVLYSDDENEEIDNIVKNVLDSTFKDEKVKSQEQIPNHWFTKGNTCFECKRNIKPPTKPGSRSKAAFHDWELKTEPPSTNHEDILKKKLSSNKDISTFSQDQKHQIEKASENIVTSILKEMLKDISSVPFGHLDSKTGSEASVLVSEKPQGLSHQEWIDQMFSVSEISTVAQEITDSVLNILHKASNYISNTTKSSISSSVHQISLHNSDTEHIVKEAPNKYPLKTWFDSEKKMKYLSLFDVDPEKPPWLKSGKSEPKPVDDINDKIIRTIFKRLKSFICPKLHMGFKSSLRSQLSKYTAKIVNIVLCAIQNELELHKENLNLREIDHTKSLTDKGFFANTDKKLESLVTSIDDDILASPLLTCIYDMLLSSENAHQRSISLSSRKPKSATDSVDVQSILPNRQDKKSFHKYLATPCTHHSVNGGNHIKENAKLQVLERIGETLHEMLSKLLGTHLHSQLSCSQQSREMTNKNQKMAAALQSNIQLISKAILDYILAKLCGVDMDTSFASCGLKAISESLDIDNPSFASIIEKMAKSTKIISSIVSRRVQEDNKEETKSKAKPVAPVSSKTPSTKEMHPNKLKAVASDILNMVFAKLEGFANGHLEILGAINDGNKKSNKIGWEYESTNISRDTHEASFLSALYMHAKKVSSAILKVIQTELNVTSSDLKTSVENPPPETQILKYVVKLILDAVSSDMFNEMESEGGGIETYRYRPTYGSLPGGAESDSFLEDDAYTAKKIIDERSPQREEVKTRSLKQWALEKTLNKIEVKLKEPHISPIAPIIRNILNEIFQSTLINQLNVLSLSHSNFNGMPHNVDEPTPQTSVQFMDKMMDPLLSEADITIVTDNIVRTVFHKLYSAAMTERNVRENRYKTITFSANVSSHEHTYKGKSSVTALDENPCTFQSRFSVADKETKVNLAEDIVQAILTNLETFATSKVKSLFYSQVNFTVPVALPIQQDHSTLSKALSAKDSYSDEQFSCCSVDHTKSGKTNLCQLSLSKLNTYALQVARRNLQGIKQELDKERENPFLTHDIGISESIASQIVNALLDIISRKGKCDKNSSDKEIDLDQQKGVIEKLLNETKYRKVLQLQIQDTIEGILCDIYEKTLFQNNLSFATPTLKCSIADKHSEENSEMFMEGANKIIPKLSVPKSDVILISNDIVNIVLHNLSSAATLVINAKNPTSARLPLTFCDTFPKIDCQQPLKGSKTERKTERFSYSRNQKSAYADDNQITVVEKEDTQKSATDSCEENANFITKTIFKRLESFATERIDSLITLAFQSKEKSFVIPELENCKQNDSIFYDSSQVESDVNVLKISATETILSQELTDFTFVGRREKLGSTIHLSQARLKTYADVIASAILKLIKNDLDLEIQKIYPYQNNILFQENIIVSEIVDSMLKMLDDKRSVKEICFNSKENSNFSQLALSNEILLGHKEKERSTKQSLFTKYPLEQNQMILENKRQIIVLEEIFMRNGESKNKEKGELLIAVEELLNKLYQRVREVTGHLPPLNETANFISNSKIKTSDTTQKNSFQSHINSVANDIVESVLGKMYLVVVTSLYENNKSRTEVEISDHNDSLLMKPLRFRETKQAGKISNSPRYAISQAYSYVDSQNISVMENTLLPYLPLQVKKDLIQMVLNKITNFVSLPLKVSPKDNPKPCFKAHLKTRSKITTLPKFTKKTHLGLSAAKAKSKTKLGPGEKTLKDSRSKTAIGLSHIMSAGDAKNLLDTKLPTSELKIYAKDIIINILETIVKEFGKVKQTKALPSDQIIAAGKIVNTVLQELYVTNNCNLAYPMKSSHLRLSQGNIGTGSLPKQQACFYLENVSSQLEHIFPREGIFKKLFDKWQTESNDKENEKCKLLMIAENVLTEISIKAKELEYSLSLLNLPPLENCESRFYNHFKGASTRAEDTKAQINMFGREIVEMLLEKLQLCFLSQIPTPDSEETLSNSKEHITAKSKYGFPNKHSLSSLPIYNTKTKDQISVGSSNQIVQEIVETVLNMLESFVDLQFKHISKYEFSEIVKMPIENLSSIQQKLLNKKMLPKLQPLKMFSDKSESNTINFKENIQNILLRVHSFHSQLLTYAVNIISDMLAVIKNKLDNEISQMEPSSISILKENIVASEIIGTLMDQCTYFNESLIQNLSRESLFQGAENAYTVNQVELATNMKMFTSKLKEGSLGINPSQVSKTGFVFCSDEDMKEKYRVSSDLPTSVRSSVEDTVKNSEPTKRPDSETMPSCSTRNKVQDHRPRESNFGSFDQTMKGNSYLPEGSFLQKLLRKASDSTEAALKQVLSFIEMGKGENLRVFHYENLKPVVEPNQIQTTISPLKICLAAENIVNTVLSSCGFPSQPHTNENREIMKPFFISKQSSLSEVSGGQKDNEKSLLRMQDKKINYIPEEENENLEASREDSSFLQKLKKKEYPKIETVKEVEAFTFADHEMGSNEVHLIARHVTTSVVTYLKNFETTVFSEEKMSVSTWSRKKYESKQFLRNIYDDSSIYQCCEHLTESVLYHLTSSISDGTKKGREKEKAWEIQEATFSKIISIHSQVFESRSISIGELALCISEIIIKILFNNKIIQADIAQKMVAIPTKYTYCPGIVSGGFDDLFQDLLVGVIHVLSKEIEVDYHFESNVRNKSFSMHRNNSVPLCNKINRQASPRDWQFSTQQIGQLFQKNKLSYLACKLNSLVGNLKTSESKEVVNKVFNIVSDLFSPDECLDTGMDSGKIQRTYFYSSNNEQPNSILTNNLQLSSKSVFLLNVVCEKLIRILLEECTSTAFPDKGSVSEETSAEECQLLKMLQSVEDGKSDYRKGGMDCECLQVDYMSDLLENVAEIDQDLLTSDSMLTIISHSLVKSLMDKLSHSIQQAPESLPFANKHLNYRTREIQSSFIKARKSELIELGQSKSSLELRSYDSNSLTVSLNNPSVVSSKIQAPFNKHCAVKSSSVSPFERQRTKEMDKVAIHNKLHQEGIYAGVYSATFLEGIISELFFNLSMSLWGKNKNITVSWLNEMNTLFVNNVVNEFNNAQVTVLRNAEERLCFPPVHTETVSKIVDSVYYDVLQQYELKVACGNNPVYDNASIAEQITNGILLEILDYKLPSCFKEHLIPHSYYPLKPEIILQKLQSNLTEFTSLPRSSSDYSTMLSHSFLEDVIRRLLSQLIPPPITCSSLGKKYLMSSDFNEMSTCIINKVMSAISKHKIWFTIYDNQYLYTGKNLQKMVDSVYCNILQMSDSLVSIQKSIVSRSPIMIDQIASFIIQEIIENHLQPFLSGEVLCHPRTPLDPVSTIVTQVLSEVIESHRPQKQSPLDIHLDSFVREIVARLLSKIFSPKHNTEIELKNMTQRIVNSINRHFNKAKIHILYDDKEQAFFSFNTDIVDELATSVYRNALKQHGLDLAVDKESEDSGIFVENITNLIVAAISDYLLHPLFSGDFSASTYSNSVAENIVQDILSNISKSTEPSQSVPLYNTLLPYTFLEDMIRVLLSKLFSSASSLVLNRDTQKDISRVNFNDIASNLVSDIRMKVSQHEIRFSKEEEETKFIYSEDDIQHLVDSVFANVVQTSGSQESAVQNITSSNDILIDRIAGFIIKHICQKHLQPFVSGKSLSSSDTYFDDERRQLFYTSVYSSTFLEDVISGVLRKIFHRVVGIVQTKSIRDSEDELFEKAEELIHLITGEFSKAQVSIIDNTEERLCLPPVERDVVKTIVDMVYSKVLQEYEMEVVPNKDFLNDTKTLAARITNIILAEIFDFQIHPDLIANLPFKSHSKLSANVLIQRVQYDISKSRFQRQASTMYTTMLSHSHLEKIVTQLTSQISPLNTSAEQSDTTKSDLSNTVIKLINEIMSIISKHEICIIKYGNKKQSMISAKDIQSMVDSIYADLSHSNIYQSITKDKKSISDIPVSKIASFIIKEIFNHHIQSFLSEDKTLLLAAVDQTYKLKAIDPKQRELSFIVNSSVFLEEVISELLCKILYAFSHNMLVTENPDRVKLKLTRIVTTLVNSIVLEFTTSEILVADNFDKNLCFSERYKEMVQKIVNSVYGKVLDQYKSLIQIHRVIQSDTICFGRKIYYLLLEEIYDYQVQSLVSGELESSSYSYPQADNIIRNVLNIITKDSHALPPYITVLPHSLLEDMVYRLLGHVFPSTHTENELKEKKFPPDDEFVEAASKLTDEIIKEISEHEIRLSMAEDNAESMQLEPIENLVDSICNNILKTSEFQAEVQKDADKKGCSFLSKLAGFIMKEIMYHHLQPFLHGEESSFSDLSDYDHVSELAKSGKEKTQPSLYSATFLEDIIIDLVHKFCSLLIITEDSKKNEMAELDIMGLALKLANSLIREFKKSDIKVLPNAEKMFSFPPIDKETVDKISNFVYEQFIEKCTSHDIQKGDESNIAIGMIAALTQKAISAFRIQPLFSGDWSSTFFSFLNPDNITQRVQHLPQNTFTQISRCAKENQLSLPDQSYKDTSSTPDCKNMMSTLEINRGTMNRKKSFKTKDTSVKKGDIQNPVLSSINAIMKSGMINLTSGLATGVTNKKEVDENKVGICTQKHSENVSKVTSTTTVKSKDTQEPNLSETFNNNEIEKKRNLIPTDKKGKDDEIYTHFSLIIDDTEYEKEVLGSDSEIGYKKKIDNARESSFKKDDKLFQLSSLKSKRNLGTTTDTLEIRIRTSSNEGRRDSPTQTCRDEEHHSDYEHVQNVIENIFEDVLELSSSPEPAYYSKLSYDQSPPGDNVLNVIQEISRDSAQSVTTKKVSSSTNKNISAKEKEEEEREKEKVREEIKSEPSKPDDPQNQRESKPGIFPAKFLEDVITEMVKQLIFSSIPETQIQDRCQNVSDKQNQAKLYDTAMKLINSLLKEFSDAQIKVFRPDKGNQFPGGKVSSVPKVPPRYKEPTTDEAPSSIKIKSADKMPPMHKMMRKPSSDKIPSIDKTLVNKVVHSSVCNILNDYGSQDSIWKNINSNGENLARRLTSAVINEIFQRQVNLIFCDEVSVSACLPLESKDVVKKVQKLAQTASKECQTSSPYTIILPHKFLENVISALFSKIFSTISSTKTKEPEDNLSTELNFLQMKLVSAVATEISQDKYMTIQYVETLQSDDDEIIQLVVQSVYNNLLPQFGSQEIIQNCVTSGCKILSENIVDLVLREVASNQLQSYFCGELTPHQCVEVENIVEKILKDVFQTTDVPLPKPSHADKLSYNIIEEIAVKFLSKLLSIFPKVHKERTKSLETDMQKITSKVLNSVQEFISKSKIKLVPPTKESPTVPVADNATIENIVNSIYTSVLKHSGSYTSVFKDLMGKSNVLSDTIGFLMVNAISNSEFQPQVEEEVSNSELVLEAVKIMEKVIKIIDELKSKEKSSSRKGLTLDAKLLEEVLALFLAKLIRLPSSSSKDEKNLSKTELNKIASQLSKLVTAEISRSSISLIASDPEEHCLNPENTERIYQVVDSVYSNILQQSGTNKEFYYDIKDTNTAFPKKVASLIIDGVSSFPLDTINSTISNADLSGELDVNRIVQKAQEHAFNVIPELEQEKLDQNLSEEESPIKIVPHVGKKPVKIDPKIISEHLAVISIKTQPLEKLKQECLKRTGHSIAELRRASISGRNYSLGSPDLEKRKTERRTSLDKTGRLDVKPLEAVARNSFQNIRKPDITKVELLKDVQSKNDLIVRLVAHDIDQVYLENYIKEERDSDEDEVVLTQTFAKEEGIKVFEDQVKEVKKPIQSKLSPKSTLSTSSLKKFLSLSKCCQTTASANIESTEAISNQVIESKETHVKRAVAELDMATPKTMPETASSSWEEKPQCKKEEKNLVTEPTHYFIHRIMSSSSYNQEDLISSTGEAEDCHSDPSAKILEESSQEQKPEHGNSVKFITIFERSKDVLGSANPSKEVISETPKPDVSKQGSKMLTKMSSTLSKVFSQCNTNISRSSSPAHQDEH

SEQ ID NO: 84 - protein, 106 aa, Homo sapiens
GQPKAAPSVTLFPPSSEELQANKATLVCLISDFYPGAVTVAWKADSSPVKAGVETTTPSKQSNNKYAASSYLSLTPEQWKSHRSYSCQVTHEGSTVEKTVAPTECS

SEQ ID NO: 85 - protein, 569 aa, Homo sapiens
MVALCSLQHLGSSDPRALPTLPTATSGQRPAKRRRKSPAMAALTRDPQFQKLQQWYREHRSELNLRRLFDANKDRFNHFSLTLNTNHGHILVDYSKNLVTEDVMRMLVDLAKSRGVEAARERMFNGEKINYTEGRAVLHVALRNRSNTPILVDGKDVMPEVNKVLDKMKSFCQGPLMVTEALKPYSSGGPRVWYVSNIDGTHIAKTLAQLNPESSLFIIASKTFTTQETITNAETAKEWFLQAAKDPSAVAKHFVALSTNTTKVKEFGIDPQNMFEFWDWVGGRYSLWSAIGLSIALHVGFDNFEQLLSGAHWMDQHFRTTPLEKNAPVLLALLGIWYINCFGCETHAMLPYDQYLHRFAAYFQQGDMESNGKYITKSGTRVDHQTGPIVWGEPGTNGQHAFYQLIHQGTKMIPCDFLIPVQTQHPIRKGLHHKILLANFLAQTEALMRGKSTEEARKELQAAGKSPEDLERLLPHKVFEGNRPTNSIVFTKLTPFMLGALVAMYEHKIFVQGIIWDINSFDQWGVELGKQLAKKIEPELDGSAQVTSHDASTNGLINFIKQQREARVQ

SEQ ID NO: 86 - protein, 5537 aa, Homo sapiens
MDSQKLAGEDKDSEPAADGPAASEDPSATESDLPNPHVGEVSVLSSGSPRLQETPQDCSGGPVRRCALCNCGEPSLHGQRELRRFELPFDWPRCPVVSPGGSPGPNEAVLPSEDLSQIGFPEGLTPAHLGEPGGSCWAHHWCAAWSAGVWGQEGPELCGVDKAIFSGISQRCSHCTRLGASIPCRSPGCPRLYHFPCATASGSFLSMKTLQLLCPEHSEGAAYLEEARCAVCEGPGELCDLFFCTSCGHHYHGACLDTALTARKRAGWQCPECKVCQACRKPGNDSKMLVCETCDKGYHTFCLKPPMEELPAHSWKCKACRVCRACGAGSAELNPNSEWFENYSLCHRCHKAQGGQTIRSVAEQHTPVCSRFSPPEPGDTPTDEPDALYVACQGQPKGGHVTSMQPKEPGPLQCEAKPLGKAGVQLEPQLEAPLNEEMPLLPPPEESPLSPPPEESPTSPPPEASRLSPPPEELPASPLPEALHLSRPLEESPLSPPPEESPLSPPPESSPFSPLEESPLSPPEESPPSPALETPLSPPPEASPLSPPFEESPLSPPPEELPTSPPPEASRLSPPPEESPMSPPPEESPMSPPPEASRLFPPFEESPLSPPPEESPLSPPPEASRLSPPPEDSPMSPPPEESPMSPPPEVSRLSPLPVVSRLSPPPEESPLSPPPEESPTSPPPEASRLSPPPEDSPTSPPPEDSPASPPPEDSLMSLPLEESPLLPLPEEPQLCPRSEGPHLSPRPEEPHLSPRPEEPHLSPQAEEPHLSPQPEEPCLCAVPEEPHLSPQAEGPHLSPQPEELHLSPQTEEPHLSPVPEEPCLSPQPEESHLSPQSEEPCLSPRPEESHLSPELEKPPLSPRPEKPPEEPGQCPAPEELPLFPPPGEPSLSPLLGEPALSEPGEPPLSPLPEELPLSPSGEPSLSPQLMPPDPLPPPLSPIITAAAPPALSPLGELEYPFGAKGDSDPESPLAAPILETPISPPPEANCTDPEPVPPMILPPSPGSPVGPASPILMEPLPPQCSPLLQHSLVPQNSPPSQCSPPALPLSVPSPLSPIGKVVGVSDEAELHEMETEKVSEPECPALEPSATSPLPSPMGDLSCPAPSPAPALDDFSGLGEDTAPLDGIDAPGSQPEPGQTPGSLASELKGSPVLLDPEELAPVTPMEVYPECKQTAGQGSPCEEQEEPRAPVAPTPPTLIKSDIVNEISNLSQGDASASFPGSEPLLGSPDPEGGGSLSMELGVSTDVSPARDEGSLRLCTDSLPETDDSLLCDAGTAISGGKAEGEKGRRRSSPARSRIKQGRSSSFPGRRRPRGGAHGGRGRGRARLKSTASSIETLVVADIDSSPSKEEEEEDDDTMQNTVVLFSNTDKFVLMQDMCVVCGSFGRGAEGHLLACSQCSQCYHPYCVNSKITKVMLLKGWRCVECIVCEVCGQASDPSRLLLCDDCDISYHTYCLDPPLLTVPKGGWKCKWCVSCMQCGAASPGFHCEWQNSYTHCGPCASLVTCPICHAPYVEEDLLIQCRHCERWMHAGCESLFTEDDVEQAADEGFDCVSCQPYVVKPVAPVAPPELVPMKVKEPEPQYFRFEGVWLTETGMALLRNLTMSPLHKRRQRRGRLGLPGEAGLEGSEPSDALGPDDKKDGDLDTDELLKGEGGVEHMECEIKLEGPVSPDVEPGKEETEESKKRKRKPYRPGIGGFMVRQRKSHTRTKKGPAAQAEVLSGDGQPDEVIPADLPAEGAVEQSLAEGDEKKKQQRRGRKKSKLEDMFPAYLQEAFFGKELLDLSRKALFAVGVGRPSFGLGTPKAKGDGGSERKELPTSQKGDDGPDIADEESRGLEGKADTPGPEDGGVKASPVPSDPEKPGTPGEGMLSSDLDRISTEELPKMESKDLQQLFKDVLGSEREQHLGCGTPGLEGSRTPLQRPFLQGGLPLGNLPSSSPMDSYPGLCQSPFLDSRERGGFFSPEPGEPDSPWTGSGGTTPSTPTTPTTEGEGDGLSYNQRSLQRWEKDEELGQLSTISPVLYANINFPNLKQDYPDWSSRCKQIMKLWRKVPAADKAPYLQKAKDNRAAHRINKVQKQAESQINKQTKVGDIARKTDRPALHLRIPPQPGALGSPPPAAAPTIFIGSPTTPAGLSTSADGFLKPPAGSVPGPDSPGELFLKLPPQVPAQVPSQDPFGLAPAYPLEPRFPTAPPTYPPYPSPTGAPAQPPMLGASSRPGAGQPGEFHTTPPGTPRHQPSTPDPFLKPRCPSLDNLAVPESPGVGGGKASEPLLSPPPFGESRKALEVKKEELGASSPSYGPPNLGFVDSPSSGTHLGGLELKTPDVFKAPLTPRASQVEPQSPGLGLRPQEPPPAQALAPSPPSHPDIFRPGSYTDPYAQPPLTPRPQPPPPESCCALPPRSLPSDPFSRVPASPQSQSSSQSPLTPRPLSAEAFCPSPVTPRFQSPDPYSRPPSRPQSRDPFAPLHKPPRPQPPEVAFKAGSLAHTSLGAGGFPAALPAGPAGELHAKVPSGQPPNFVRSPGTGAFVGTPSPMRFTFPQAVGEPSLKPPVPQPGLPPPHGINSHFGPGPTLGKPQSTNYTVATGNFHPSGSPLGPSSGSTGESYGLSPLRPPSVLPPPAPDGSLPYLSHGASQRSGITSPVEKREDPGTGMGSSLATAELPGTQDPGMSGLSQTELEKQRQRQRLRELLIRQQIQRNTLRQEKETAAAAAGAVGPPGSWGAEPSSPAFEQLSRGQTPFAGTQDKSSLVGLPPSKLSGPILGPGSFPSDDRLSRPPPPATPSSMDVNSRQLVGGSQAFYQRAPYPGSLPLQQQQQQLWQQQQATAATSMRFAMSARFPSTPGPELGRQALGSPLAGISTRLPGPGEPVPGPAGPAQFIELRHNVQKGLGPGGTPFPGQGPPQRPRFYPVSEDPHRLAPEGLRGLAVSGLPPQKPSAPPAPELNNSLHPTPHTKGPTLPTGLELVNRPPSSTELGRPNPLALEAGKLPCEDPELDDDFDAHKALEDDEELAHLGLGVDVAKGDDELGTLENLETNDPHLDDLLNGDEFDLLAYTDPELDTGDKKDIFNEHLRLVESANEKAEREALLRGVEPGPLGPEERPPPAADASEPRLASVLPEVKPKVEEGGRHPSPCQFTIATPKVEPAPAANSLGLGLKPGQSMMGSRDTRMGTGPFSSSGHTAEKASFGATGGPPAHLLTPSPLSGPGGSSLLEKFELESGALTLPGGPAASGDELDKMESSLVASELPLLIEDLLEHEKKELQKKQQLSAQLQPAQQQQQQQQQHSLLSAPGPAQAMSLPHEGSSPSLAGSQQQLSLGLAGARQPGLPQPLMPTQPPAHALQQRLAPSMAMVSNQGHMLSGQHGGQAGLVPQQSSQPVLSQKPMGTMPPSMCMKPQQLAMQQQLANSFFPDTDLDKFAAEDIIDPIAKAKMVALKGIKKVMAQGSIGVAPGMNRQQVSLLAQRLSGGPSSDLQNHVAAGSGQERSAGDPSQPRPNPPTFAQGVINEADQRQYEEWLFHTQQLLQMQLKVLEEQIGVHRKSRKALCAKQRTAKKAGREFPEADAEKLKLVTEQQSKIQKQLDQVRKQQKEHTNLMAEYRNKQQQQQQQQQQQQQQHSAVLALSPSQSPRLLTKLPGQLLPGHGLQPPQGPPGGQAGGLRLTPGGMALPGQPGGPFLNTALAQQQQQQHSGGAGSLAGPSGGFFPGNLALRSLGPDSRLLQERQLQLQQQRMQLAQKLQQQQQQQQQQQHLLGQVAIQQQQQQGPGVQTNQALGPKPQGLMPPSSHQGLLVQQLSPQPPQGPQGMLGPAQVAVLQQQHPGALGPQGPHRQVLMTQSRVLSSPQLAQQGQGLMGHRLVTAQQQQQQQQHQQQGSMAGLSHLQQSLMSHSGQPKLSAQPMGSLQQLQQQQQLQQQQQLQQQQQQQLQQQQQLQQQQLQQQQQQQQLQQQQQQQLQQQQQQLQQQQQQQQQQFQQQQQQQQMGLLNQSRTLLSPQQQQQQQVALGPGMPAKPLQHFSSPGALGPTLLLTGKEQNTVDPAVSSEATEGPSTHQGGPLAIGTTPESMATEPGEVKPSLSGDSQLLLVQPQPQPQPSSLQLQPPLRLPGQQQQQVSLLHTAGGGSHGQLGSGSSSEASSVPHLLAQPSVSLGDQPGSMTQNLLGPQQPMLERPMQNNTGPQPPKPGPVLQSGQGLPGVGIMPTVGQLRAQLQGVLAKNPQLRHLSPQQQQQLQALLMQRQLQQSQAVRQTPPYQEPGTQTSPLQGLLGCQPQLGGFPGPQTGPLQELGAGPRPQGPPRLPAPPGALSTGPVLGPVHPTPPPSSPQEPKRPSQLPSPSSQLPTEAQLPPTHPGTPKPQGPTLEPPPGRVSPAAAQLADTLFSKGLGPWDPPDNLAETQKPEQSSLVPGHLDQVNGQVVPEASQLSIKQEPREEPCALGAQSVKREANGEPIGAPGTSNHLLLAGPRSEAGHLLLQKLLRAKNVQLSTGRGSEGLRAEINGHIDSKLAGLEQKLQGTPSNKEDAAARKPLTPKPKRVQKASDRLVSSRKKLRKEDGVRASEALLKQLKQELSLLPLTEPAITANFSLFAPFGSGCPVNGQSQLRGAFGSGALPTGPDYYSQLLTKNNLSNPPTPPSSLPPTPPPSVQQKMVNGVTPSEELGEHPKDAASARDSERALRDTSEVKSLDLLAALPTPPHNQTEDVRMESDEDSDSPDSIVPASSPESILGEEAPRFPHLGSGRWEQEDRALSPVIPLIPRASIPVFPDTKPYGALGLEVPGKLPVTTWEKGKGSEVSVMLTVSAAAAKNLNGVMVAVAELLSMKIPNSYEVLFPESPARAGTEPKKGEAEGPGGKEKGLEGKSPDTGPDWLKQFDAVLPGYTLKSQLDILSLLKQESPAPEPPTQHSYTYNVSNLDVRQLSAPPPEEPSPPPSPLAPSPASPPTEPLVELPTEPLAEPPVPSPLPLASSPESARPKPRARPPEEGEDSRPPRLKKWKGVRWKRLRLLLTIQKGSGRQEDEREVAEFMEQLGTALRPDKVPRDMRRCCFCHEEGDGATDGPARLLNLDLDLWVHLNCALWSTEVYETQGGALMNVEVALHRGLLTKCSLCQRTGATSSCNRMRCPNVYHFACAIRAKCMFFKDKTMLCPMHKIKGPCEQELSSFAVFRRVYIERDEVKQIASIIQRGERLHMFRVGGLVFHAIGQLLPHQMADFHSATALYPVGYEATRIYWSLRTNNRRCCYRCSIGENNGRPEFVIKVIEQGLEDLVFTDASPQAVWNRIIEPVAAMRKEADMLRLFPEYLKGEELFGLTVHAVLRIAESLPGVESCQNYLFRYGRHPLMELPLMINPTGCARSEPKILTHYKRPHTLNSTSMSKAYQSTFTGETNTPYSKQFVHSKSSQYRRLRTEWKNNVYLARSRIQGLGLYAAKDLEKHTMVIEYIGTIIRNEVANRREKIYEEQNRGIYMFRINNEHVIDATLTGGPARYINHSCAPNCVAEVVTFDKEDKIIIISSRRIPKGEELTYDYQFDFEDDQHKIPCHCGAWNCRKWMN

SEQ ID NO: 87 - protein, 5795 aa, Homo sapiens
MCDCFHMVLPTWPGTPGSVSGRQLQPGEPGAETEDDHSVTEGPADEGIRPRPQGSSPVYEYTTEAADFGLQEDAPGRQGSAGRRRSWWKRDSGDSRTFFRMSRPEAVQEATEVTLKTEVEAGASGYSVTGGGDQGIFVKQVLKDSSAAKLFNLREGDQLLSTTVFFENIKYEDALKILQYSEPYKVQFKIRRQLPAPQDEEWASSDAQHGPQGKEKEDTDVADGCRETPTKTLEGDGDQERLISKPRVGRGRQSQRERLSWPKFQSIKSKRGPGPQRSHSSSEAYEPRDAHDVSPTSTDTEAQLTVERQEQKAGPGSQRRRKFLNLRFRTGSGQGPSSTGQPGRGFQSGVGRAGVLEELGPWGDSLEETGAATGSRREERAEQDREVMPAQSMPLPTELGDPRLCEGTPQEGGLRAARLHGKTLEGQAQETAVAQRKPRAQPTPGMSREGEGEGLQSLEIGIARLSLRDTTEGGTQIGPPEIRVRVHDLKTPKFAFSTEKEPERERRLSTPQRGKRQDASSKAGTGLKGEEVEGAGWMPGREPTTHAEAQGDEGDGEEGLQRTRITEEQDKGREDTEGQIRMPKFKIPSLGWSPSKHTKTGREKATEDTEQGREGEATATADRREQRRTEEGLKDKEDSDSMTNTTKIQLIHDEKRLKKEQILTEKEVATKDSKFKMPKFKMPLFGASAPGKSMEASVDVSAPKVEADVSLLSMQGDLKTTDLSVQTPSADLEVQDGQVDVKLPEGPLPEGASLKGHLPKVQRPSLKMPKVDLKGPKLDLKGPKAEVTAPDVKMSLSSMEVDVQAPRAKLDGARLEGDLSLADKEVTAKDSKFKMPKFKMPSFGVSAPGKSMEDSVDVSAPKVEADVSLSSMQGDLKATDLSIQPPSADLEVQAGQVDVKLPEGPVPEGAGPKVHLPKVEMPSFKMPKVDLKGPQIDVKGPKLDLKGPKAEVTAPDGEVSLPSMEVDVQAQKAKLDGAWLEGDLSLADKDVTAKDSKFKMPKFKMPSFGVSAPGKSIKALVDVSAPKVEADLSLPSMQGDLKTTDLSIQPASTDLKVQADQVDVKLPEGHLPEGAGLKGHLPKVEMPSFKMPKVALKGPQVDVKGPKLDLKSPKAEVTAPDVEVSLPSVEVDVEAPGAKLDSARLEGELSLADKDVTAKDSRFKMPKFKMPSFGASAPGKSIEASVDVSAPKVEADVSLPSMQGDLKTTDLSIQPPSADLEVHAGQVDVKLLEGHVPEGAGFKGHLPKVQMPSLKMPKVDLKGPQVEVRGPKLDLKGHKAEVTAHEVAVSLPSVEVDMQAPGAKLDGAQLDGDLSLADKDVTAKDSKFKMPKFKMPSFGVSAPGKSIEASVDLSAPKVEADMSLPSMQGDLKTTDLSIQPPSTDLELQAGQLDVKLPEGPVPEGAGLKGHLPKLQMPSFKVPKVDLKGPEIDIKGPKLDLKDPKVEVTAPDVEVSLPSVEVDVEAPGAKLDGGRLEEDMSLADKDLTTKDSKFKMPKFKMPSFGVSAPGKSIEASVDVSAPKVEADVSLPSMQGDLKATDLSIQPPSADLEVQAGQVDVKLPEGPVSEGAGLKGHLPKVQMPSFKMPKVDLKGPQIDVKGPKLDLKGPKVEVTAPDVKMSLSSMEVDVQAPRAKLDGAQLEGDLSLADKAVTAKDSKFKMPKFKMPSFGVSAPGKSIEASVDVSEPKVEADVSLPSMQGDLKTTDLSIQSPSADLEVQAGQVNVKLPEGPLPEGAGFKGHLPKVQMPSLKMPKVALKGPQMDVKGPKLDLKGPKAEVMAPDVEVSLPSVEVDVEAPGAKLDSVRLEGDLSLADKDVTAKDSKFKMPKFKMPSFGVSAPGKSIEASVDVSAPKVEAEVSLPSMQGDLKTTDLCIPLPSADLVVQAGQVDMKLPEGQVPEGAGLKGHLPKVDMPSFKMPKVDLKGPQTDVKGAKLDLKGPKAEVTAPDVEVSLPSMEVDVQAQKAKLDGARLEGDLSLADKDMTAKDSKFKMPKFKMPSFGVSAPGRSIEASVDVPAPKVEADVSLPSMQGDLKTTDLSIQPPSADLKVQTGQVDVKLPEGHVPEGAGLKGHLPKVEMPSLKMPKVDLKGPQVDIKGPKLDLKDPKVEMRVPDVEVSLPSMEVDVQAPRAKLDSAHLQGDLTLANKDLTTKDSKFKMPKFKMPSFGVSAPGKSIEASVDVSPPKVEADMSLPSMQGDLKTTDLSIQPLSADVKVQAGQVDVKLLEGPVPEEVGLKGHLPKLQMPSFKVPKVDLKGPEIDIKGPKLDLKDPKVEVTAPDVEVSLPSVEVDVKAPGAKLDGARLEGDMSLADKDVTAKDSKFKMPKFKMLSFGVSALGKSIEASADVSALKVEADVSLPSMQGDLKTTDLSVQPPSADLEVQAGQVDVKLPEGPVPEGAGLKGHLPKLQMPSFKMPKVDLKGPQIDVKGPKLDLKGPKTDVMAPDVEVSQPSVEVDVEAPGAKLDGAWLEGDLSVADKDVTTKDSRFKIPKFKMPSFGVSAPGKSIEASVDVSAPKVEADGSLSSMQGDLKATDLSIQPPSADLEVQAGQVDVKLPEGPVPEGAGLKGHLPKVQMPSFKMPEMDLKGPQLDVKGPKLDLKGPKAEVTAPDVEMSLSSMEVDVQAPRAKLDGARLEGDLSLADKGVTAKDSKFKMPKFKMPSFRVSAPGESIEALVDVSELKVEADMSLPSMQGDLKTTDISIQPPSAQLEVQAGQVDVKLPEGHVPEGAGLKGHLPKLQMPSFKMPEVDLKGPQIDVKGPNVDLKGPKAEVTAPDVKMSLSSMEVDVQAPRAKLDGARLEGDLSLADKGMTAKDSKFKMPKFKMPSFGVSAPGKSIEASVDVSELKVEADGSFPSMQGDLKTTDIRIQPPSAQLEVQAGQVDVKLPEGHVPEGAGLKGHLPKVQMPSFKMPKVDLKGPQIDVKGPKLDLKGPKAEVTAPDVEVSLPSVEVDVEAPRAKLDGARLEGDLSLADKDVTAKDSKFKMPKFKMPSFGVSAPGKSIEVSVDVSAPKVEAEVSLPSMQGDLKTTDISIEPPSAQLEVQAGQVDLKLPEGHVPEGAGLKGHLPKLQMPSFKMPKVDRKGPQIDVKGPKLDLKGPKTDVTAPDVEVSQPGMEVDVEAPGAKLDGARLEGDLSLADKDVTAKDSKFKMPKFKMPSFGVSAPGKSIEVLVDVSAPKVEADLSLPSMQGDLKNTDISIEPPSAQLEVQAGQVDVKLPEGHVLEGAGLKGHLPKLQMPSFKMPKVDRKGPQIDIKGPKLDLKGPKMDVTAPDVEVSQPSMEVDVEAPGAKLDGARLEGDLSLADKDVTAKDSKFKMPKFKMPSYRASAPGKSIQASVDVSAPKAEADVSLPSMQGDLKTTDLSIQLPSVDLEVQAGQVDVKLPEGHVPEGAGLKGHLPKVEMPSFKMPKVDLKSPQVDIKGPKLDLKVPKAEVTVPDVEVSLPSVEVDVQAPRAKLDGARLEGDLSLAEKDVTAKDSKFKMPKFKMPSFGVSAPGRSIEASLDVSAPKVEADVSLSSMQGDLKATDLSIQPPSADLEVQAVQVDVELLEGPVPEGAGLKGHLPKVEMPSLKTPKVDLKGPQIDVKGPKLDLKGPKAEVRVPDVEVSLPSVEVDVQAPKAKLDAGRLEGDLSLADKDVTAKDSKFKMPKFKMPSFRVSAPGKSMEASVDVSAPKVEADVSLPSMQGDLKTTDLSIQPPSADLKVQAGQMDVKLPEGQVPEGAGLKEHLPKVEMPSLKMPKVDLKGPQVDIKGPKLDLKVSKAEVTAPDVEVSLPSVEVDVQAPRAKLDSAQLEGDLSLADKDVTAKDSKFKMPKFKMPSFGVSAPGKSIEASVHVSAPKVEADVSLPSMQGDLKTTDLSIQPHSADLTVQARQVDMKLLEGHVPEEAGLKGHLPKVQMPSFKMPKVDLKGPEIDIKGPKLDLKDPKVEVTAPDVEVSLPSVEVDVEAPGAKLDGARLEGDLSLADKDMTAKDSKFKMPKFKMPSFGVSAPGKSMEASVDVTAPKVEADVSLPSMQGDLKATDLSVQPPSADLEVQAGQVDVKLPEGPVPEGASLKGHLPKVQMPSFKMPKVDLKGPQIDVKGPKLDLKGPKAEVTAPDVKMSLSSMEVDVQAPRAKLDGVQLEGDLSLADKDVTAKDSKFKMPKFKMPSFGVSAPGKSMEASVDVSELKAKADVSLPSMQGDLKTTDLSIQSPSADLEVQAGQVDVKLPEGPLPKGAGLKGHLPKVQMPCLKMPKVALKGPQVDVKGPKLDLKGPKADVMTPVVEVSLPSMEVDVEAPGAKLDSVRLEGDLSLADKDMTAKDSKFKMPKFKMPSFGVSAPGKSIEASLDVSALKVEADVSLPSMQGDLKTTHLSIQPPSADLEVQAGQEDVKLPEGPVHEGAGLKGHLPKLQMPSFKVPKVDLKGPQIDVNVPKLDLKGPKVEVTSPNLDVSLPSMEVDIQAPGAKLDSTRLEGDLSLADKDVTAKDSKFKMPKFKMPSFGMLSPGKSIEVSVDVSAPKMEADMSIPSMQGDLKTTDLRIQAPSADLEVQAGQVDLKLPEGHMPEVAGLKGHLPKVEMPSFKMPKVDLKGPQVDVKGPKLDLKGPKAEVMAPDVEVSLPSVETDVQAPGSMLDGARLEGDLSLAHEDVAGKDSKFQGPKLSTSGFEWSSKKVSMSSSEIEGNVTFHEKTSTFPIVESVVHEGDLHDPSRDGNLGLAVGEVGMDSKFKKLHFKVPKVSFSSTKTPKDSLVPGAKSSIGLSTIPLSSSECSSFELQQVSACSEPSMQMPKVGFAGFPSSRLDLTGPHFESSILSPCEDVTLTKYQVTVPRAALAPELALEIPSGSQADIPLPKTECSTDLQPPEGVPTSQAESHSGPLNSMIPVSLGQVSFPKFYKPKFVFSVPQMAVPEGDLHAAVGAPVMSPLSPGERVQCPLPSTQLPSPGTCVSQGPEELVASLQTSVVAPGEAPSEDADHEGKGSPLKMPKIKLPSFRWSPKKETGPKVDPECSVEDSKLSLVLDKDEVAPQSAIHMDLPPERDGEKGRSTKPGFAMPKLALPKMKASKSGVSLPQRDVDPSLSSATAGGSFQDTEKASSDGGRGGLGATASATGSEGVNLHRPQVHIPSLGFAKPDLRSSKAKVEVSQPEADLPLPKHDLSTEGDSRGCGLGDVPVSQPCGEGIAPTPEDPLQPSCRKPDAEVLTVESPEEEAMTKYSQESWFKMPKFRMPSLRRSFRDRGGAGKLEVAQTQAPAATGGEAAAKVKEFLVSGSNVEAAMSLQLPEADAEVTASESKSSTDILRCDLDSTGLKLHLSTAGMTGDELSTSEVRIHPSKGPLPFQMPGMRLPETQVLPGEIDETPLSKPGHDLASMEDKTEKWSSQPEGPLKLKASSTDMPSQISVVNVDQLWEDSVLTVKFPKLMVPRFSFPAPSSEDDVFIPTVREVQCPEANIDTALCKESPGLWGASILKAGAGVPGEQPVDLNLPLEAPPISKVRVHIQGAQVESQEVTIHSIVTPEFVDLSVPRTFSTQIVRESEIPTSEIQTPSYGFSLLKVKIPEPHTQARVYTTMTQHSRTQEGTEEAPIQATPGVDSISGDLQPDTGEPFEMISSSVNVLGQQTLTFEVPSGHQLADSCSDEEPAEILEFPPDDSQEATTPLADEGRAPKDKPESKKSGLLWFWLPNIGFSSSVDETGVDSKNDVQRSAPIQTQPEARPEAELPKKQEKAGWFRFPKLGFSSSPTKKSKSTEDGAELEEQKLQEETITFFDARESFSPEEKEEGELIGPVGTGLDSRVMVTSAARTELILPEQDRKADDESKGSGLGPNEG

SEQ ID NO: 88 - protein, 5890 aa, Homo sapiens
MEKEETTRELLLPNWQGSGSHGLTIAQRDDGVFVQEVTQNSPAARTGVVKEGDQIVGATIYFDNLQSGEVTQLLNTMGHHTVGLKLHRKGDRSPEPGQTWTREVFSSCSSEVVLSGDDEEYQRIYTTKIKPRLKSEDGVEGDLGETQSRTITVTRRVTAYTVDVTGREGAKDIDISSPEFKIKIPRHELTEISNVDVETQSGKTVIRLPSGSGAASPTGSAVDIRAGAISASGPELQGAGHSKLQVTMPGIKVGGSGVNVNAKGLDLGGRGGVQVPAVDISSSLGGRAVEVQGPSLESGDHGKIKFPTMKVPKFGVSTGREGQTPKAGLRVSAPEVSVGHKGGKPGLTIQAPQLEVSVPSANIEGLEGKLKGPQITGPSLEGDLGLKGAKPQGHIGVDASAPQIGGSITGPSVEVQAPDIDVQGPGSKLNVPKMKVPKFSVSGAKGEETGIDVTLPTGEVTVPGVSGDVSLPEIATGGLEGKMKGTKVKTPEMIIQKPKISMQDVDLSLGSPKLKGDIKVSAPGVQGDVKGPQVALKGSRVDIETPNLEGTLTGPRLGSPSGKTGTCRISMSEVDLNVAAPKVKGGVDVTLPRVEGKVKVPEVDVRGPKVDVSAPDVEAHGPEWNLKMPKMKMPTFSTPGAKGEGPDVHMTLPKGDISISGPKVNVEAPDVNLEGLGGKLKGPDVKLPDMSVKTPKISMPDVDLHVKGTKVKGEYDVTVPKLEGELKGPKVDIDAPDVDVHGPDWHLKMPKMKMPKFSVPGFKAEGPEVDVNLPKADVDISGPKIDVTAPDVSIEEPEGKLKGPKFKMPEMNIKVPKISMPDVDLHLKGPNVKGEYDVTMPKVESEIKVPDVELKSAKMDIDVPDVEVQGPDWHLKMPKMKMPKFSMPGFKAEGPEVDVNLPKADVDISGPKVGVEVPDVNIEGPEGKLKGPKFKMPEMNIKAPKISMPDVDLHMKGPKVKGEYDMTVPKLEGDLKGPKVDVSAPDVEMQGPDWNLKMPKIKMPKFSMPSLKGEGPEFDVNLSKANVDISAPKVDTNAPDLSLEGPEGKLKGPKFKMPEMHFRAPKMSLPDVDLDLKGPKMKGNVDISAPKIEGEMQVPDVDIRGPKVDIKAPDVEGQGLDWSLKIPKMKMPKFSMPSLKGEGPEVDVNLPKADVVVSGPKVDIEAPDVSLEGPEGKLKGPKFKMPEMHFKTPKISMPDVDLHLKGPKVKGDVDVSVPKVEGEMKVPDVEIKGPKMDIDAPDVEVQGPDWHLKMPKMKMPKFSMPGFKGEGREVDVNLPKADIDVSGPKVDVEVPDVSLEGPEGKLKGPKFKMPEMHFKAPKISMPDVDLNLKGPKLKGDVDVSLPEVEGEMKVPDVDIKGPKVDISAPDVDVHGPDWHLKMPKVKMPKFSMPGFKGEGPEVDVKLPKADVDVSGPKMDAEVPDVNIEGPDAKLKGPKFKMPEMSIKPQKISIPDVGLHLKGPKMKGDYDVTVPKVEGEIKAPDVDIKGPKVDINAPDVEVHGPDWHLKMPKVKMPKFSMPGFKGEGPEVDMNLPKADLGVSGPKVDIDVPDVNLEAPEGKLKGPKFKMPSMNIQTHKISMPDVGLNLKAPKLKTDVDVSLPKVEGDLKGPEIDVKAPKMDVNVGDIDIEGPEGKLKGPKFKMPEMHFKAPKISMPDVDLHLKGPKVKGDMDVSVPKVEGEMKVPDVDIKGPKVDIDAPDVEVHDPDWHLKMPKMKMPKFSMPGFKAEGPEVDVNLPKADIDVSGPSVDTDAPDLDIEGPEGKLKGSKFKMPKLNIKAPKVSMPDVDLNLKGPKLKGEIDASVPELEGDLRGPQVDVKGPFVEAEVPDVDLECPDAKLKGPKFKMPEMHFKAPKISMPDVDLHLKGPKVKGDADVSVPKLEGDLTGPSVGVEVPDVELECPDAKLKGPKFKMPDMHFKAPKISMPDVDLHLKGPKVKGDVDVSVPKLEGDLTGPSVGVEVPDVELECPDAKLKGPKFKMPEMHFKTPKISMPDVDLHLKGPKVKGDMDVSVPKVEGEMKVPDVDIKGPKMDIDAPDVDVHGPDWHLKMPKMKMPKFSMPGFKAEGPEVDVNLPKADVVVSGPKVDVEVPDVSLEGPEGKLKGPKLKMPEMHFKAPKISMPDVDLHLKGPKVKGDVDVSLPKLEGDLTGPSVDVEVPDVELECPDAKLKGPKFKMPEMHFKTPKISMPDVNLNLKGPKVKGDMDVSVPKVEGEMKVPDVDIRGPKVDIDAPDVDVHGPDWHLKMPKMKMPKFSMPGFKGEGPEVDVNLPKADVDVSGPKVDVEVPDVSLEGPEGKLKGPKFKMPEMHFKTPKISMPDVDFNLKGPKIKGDVDVSAPKLEGELKGPELDVKGPKLDADMPEVAVEGPNGKWKTPKFKMPDMHFKAPKISMPDLDLHLKSPKAKGEVDVDVPKLEGDLKGPHVDVSGPDIDIEGPEGKLKGPKFKMPDMHFKAPNISMPDVDLNLKGPKIKGDVDVSVPEVEGKLEVPDMNIRGPKVDVNAPDVQAPDWHLKMPKMKMPKFSMPGFKAEGPEVDVNLPKADVDISGPKVDIEGPDVNIEGPEGKLKGPKLKMPEMNIKAPKISMPDFDLHLKGPKVKGDVDVSLPKVEGDLKGPEVDIKGPKVDINAPDVGVQGPDWHLKMPKVKMPKFSMPGFKGEGPDGDVKLPKADIDVSGPKVDIEGPDVNIEGPEGKLKGPKFKMPEMNIKAPKISMPDIDLNLKGPKVKGDVDVSLPKVEGDLKGPEVDIKGPKVDIDAPDVDVHGPDWHLKMPKIKMPKISMPGFKGEGPDVDVNLPKADIDVSGPKVDVECPDVNIEGPEGKWKSPKFKMPEMHFKTPKISMPDIDLNLTGPKIKGDVDVTGPKVEGDLKGPEVDLKGPKVDIDVPDVNVQGPDWHLKMPKMKMPKFSMPGFKAEGPEVDVNLPKADVDVSGPKVDVEGPDVNIEGPEGKLKGPKFKMPEMNIKAPKIPMPDFDLHLKGPKVKGDVDISLPKVEGDLKGPEVDIRGPQVDIDVPDVGVQGPDWHLKMPKVKMPKFSMPGFKGEGPDVDVNLPKADLDVSGPKVDIDVPDVNIEGPEGKLKGPKFKMPEMNIKAPKISMPDIDLNLKGPKVKGDMDVSLPKVEGDMKVPDVDIKGPKVDINAPDVDVQGPDWHLKMPKIKMPKISMPGFKGEGPEVDVNLPKADLDVSGPKVDVDVPDVNIEGPDAKLKGPKFKMPEMNIKAPKISMPDLDLNLKGPKMKGEVDVSLANVEGDLKGPALDIKGPKIDVDAPDIDIHGPDAKLKGPKLKMPDMHVNMPKISMPEIDLNLKGSKLKGDVDVSGPKLEGDIKAPSLDIKGPEVDVSGPKLNIEGKSKKSRFKLPKFNFSGSKVQTPEVDVKGKKPDIDITGPKVDINAPDVEVQGKVKGSKFKMPFLSISSPKVSMPDVELNLKSPKVKGDLDIAGPNLEGDFKGPKVDIKAPEVNLNAPDVDVHGPDWNLKMPKMKMPKFSVSGLKAEGPDVAVDLPKGDINIEGPSMNIEGPDLNVEGPEGGLKGPKFKMPDMNIKAPKISMPDIDLNLKGPKVKGDVDISLPKLEGDLKGPEVDIKGPKVDINAPDVDVHGPDWHLKMPKVKMPKFSMPGFKGEGPEVDVTLPKADIDISGPNVDVDVPDVNIEGPDAKLKGPKFKMPEMNIKAPKISMPDFDLNLKGPKMKGDVVVSLPKVEGDLKGPEVDIKGPKVDIDTPDINIEGSEGKFKGPKFKIPEMHLKAPKISMPDIDLNLKGPKVKGDVDVSLPKMEGDLKGPEVDIKGPKVDINAPDVDVQGPDWHLKMPKVKMPKFSMPGFKGEGPDVDVNLPKADLDVSGPKVDIDVPDVNIEGPEGKLKGPKFKMPEMNIKAPKISMPDIDLNLKGPKVKGDMDVSLPKVEGDMQVPDLDIKGPKVDINAPDVDVRGPDWHLKMPKIKMPKISMPGFKGEGPEVDVNLPKADLDVSGPKVDVDVPDVNIEGPDAKLKGPKFKMPEMNIKAPKISMPDFDLHLKGPKVKGDVDVSLPKMEGDLKAPEVDIKGPKVDIDAPDVDVHGPDWHLKMPKVKMPKFSMPGFKGEGPEVDVNLPKADIDVSGPKVDIDTPDIDIHGPEGKLKGPKFKMPDLHLKAPKISMPEVDLNLKGPKMKGDVDVSLPKVEGDLKGPEVDIKGPKVDIDVPDVDVQGPDWHLKMPKVKMPKFSMPGFKGEGPDVDVNLPKADLDVSGPKVDIDVPDVNIEGPDAKLKGPKFKMPEMNIKAPKISMPDFDLHLKGPKVKGDVDVSLPKVEGDLKGPEVDIKGPKVDIDAPDVDVHGPDWHLKMPKVKMPKFSMPGFKGEGPDVDVTLPKADIEISGPKVDIDAPDVSIEGPDAKLKGPKFKMPEMNIKAPKISMPDIDFNLKGPKVKGDVDVSLPKVEGDLKGPEIDIKGPSLDIDTPDVNIEGPEGKLKGPKFKMPEMNIKAPKISMPDFDLHLKGPKVKGDVDVSLPKVESDLKGPEVDIEGPEGKLKGPKFKMPDVHFKSPQISMSDIDLNLKGPKIKGDMDISVPKLEGDLKGPKVDVKGPKVGIDTPDIDIHGPEGKLKGPKFKMPDLHLKAPKISMPEVDLNLKGPKVKGDMDISLPKVEGDLKGPEVDIRDPKVDIDVPDVDVQGPDWHLKMPKVKMPKFSMPGFKGEGPDVDVNLPKADIDVSGPKVDVDVPDVNIEGPDAKLKGPKFKMPEMSIKAPKISMPDIDLNLKGPKVKGDVDVTLPKVEGDLKGPEADIKGPKVDINTPDVDVHGPDWHLKMPKVKMPKFSMPGFKGEGPDVDVSLPKADIDVSGPKVDVDIPDVNIEGPDAKLKGPKFKMPEINIKAPKISIPDVDLDLKGPKVKGDFDVSVPKVEGTLKGPEVDLKGPRLDFEGPDAKLSGPSLKMPSLEISAPKVTAPDVDLHLKAPKIGFSGPKLEGGEVDLKGPKVEAPSLDVHMDSPDINIEGPDVKIPKFKKPKFGFGAKSPKADIKSPSLDVTVPEAELNLETPEISVGGKGKKSKFKMPKIHMSGPKIKAKKQGFDLNVPGGEIDASLKAPDVDVNIAGPDAALKVDVKSPKTKKTMFGKMYFPDVEFDIKSPKFKAEAPLPSPKLEGELQAPDLELSLPAIHVEGLDIKAKAPKVKMPDVDISVPKIEGDLKGPKVQANLGAPDINIEGLDAKVKTPSFGISAPQVSIPDVNVNLKGPKIKGDVPSVGLEGPDVDLQGPEAKIKFPKFSMPKIGIPGVKMEGGGAEVHAQLPSLEGDLRGPDVKLEGPDVSLKGPGVDLPSVNLSMPKVSGPDLDLNLKGPSLKGDLDASVPSMKVHAPGLNLSGVGGKMQVGGDGVKVPGIDATTKLNVGAPDVTLRGPSLQGDLAVSGDIKCPKVSVGAPDLSLEASEGSIKLPKMKLPQFGISTPGSDLHVNAKGPQVSGELKGPGVDVNLKGPRISAPNVDFNLEGPKVKGSLGATGEIKGPTVGGGLPGIGVQGLEGNLQMPGIKSSGCDVNLPGVNVKLPTGQISGPEIKGGLKGSEVGFHGAAPDISVKGPAFNMASPESDFGINLKGPKIKGGADVSGGVSAPDISLGEGHLSVKGSGGEWKGPQVSSALNLDTSKFAGGLHFSGPKVEGGVKGGQIGLQAPGLSVSGPQGHLESGSGKVTFPKMKIPKFTFSGRELVGREMGVDVHFPKAEASIQAGAGDGEWEESEVKLKKSKIKMPKFNFSKPKGKGGVTGSPEASISGSKGDLKSSKASLGSLEGEAEAEASSPKGKFSLFKSKKPRHRSNSFSDEREFSGPSTPTGTLEFEGGEVSLEGGKVKGKHGKLKFGTFGGLGSKSKGHYEVTGSDDETGKLQGSGVSLASKKSRLSSSSSNDSGNKVGIQLPEVELSVSTKKE

SEQ ID NO: 89 - protein, 644 aa, Homo sapiens
MSRQFSSRSGYRSGGGFSSGSAGIINYQRRTTSSSTRRSGGGGGRFSSCGGGGGSFGAGGGFGSRSLVNLGGSKSISISVARGGGRGSGFGGGYGGGGFGGGGFGGGGFGGGGIGGGGFGGFGSGGGGFGGGGFGGGGYGGGYGPVCPPGGIQEVTINQSLLQPLNVEIDPEIQKVKSREREQIKSLNNQFASFIDKVRFLEQQNQVLQTKWELLQQVDTSTRTHNLEPYFESFINNLRRRVDQLKSDQSRLDSELKNMQDMVEDYRNKYEDEINKRTNAENEFVTIKKDVDGAYMTKVDLQAKLDNLQQEIDFLTALYQAELSQMQTQISETNVILSMDNNRSLDLDSIIAEVKAQYEDIAQKSKAEAESLYQSKYEELQITAGRHGDSVRNSKIEISELNRVIQRLRSEIDNVKKQISNLQQSISDAEQRGENALKDAKNKLNDLEDALQQAKEDLARLLRDYQELMNTKLALDLEIATYRTLLEGEESRMSGECAPNVSVSVSTSHTTISGGGSRGGGGGGYGSGGSSYGSGGGSYGSGGGGGGGRGSYGSGGSSYGSGGGSYGSGGGGGGHGSYGSGSSSGGYRGGSGGGGGGSSGGRGSGGGSSGGSIGGRGSSSGGVKSSGGSSSVKFVSTTYSGVTR

SEQ ID NO: 90 - protein, 6306 aa, Homo sapiens
MSVFLGPGMPSASLLVNLLSALLILFVFGETEIRFTGQTEFVVNETSTTVIRLIIERIGEPANVTAIVSLYGEDAGDFFDTYAAAFIPAGETNRTVYIAVCDDDLPEPDETFIFHLTLQKPSANVKLGWPRTVTVTILSNDNAFGIISFNMLPSIAVSEPKGRNESMPLTLIREKGTYGMVMVTFEVEGGPNPPDEDLSPVKGNITFPPGRATVIYNLTVLDDEVPENDEIFLIQLKSVEGGAEINTSRNSIEIIIKKNDSPVRFLQSIYLVPEEDHILIIPVVRGKDNNGNLIGSDEYEVSISYAVTTGNSTAHAQQNLDFIDLQPNTTVVFPPFIHESHLKFQIVDDTIPEIAESFHIMLLKDTLQGDAVLISPSVVQVTIKPNDKPYGVLSFNSVLFERTVIIDEDRISRYEEITVVRNGGTHGNVSANWVLTRNSTDPSPVTADIRPSSGVLHFAQGQMLATIPLTVVDDDLPEEAEAYLLQILPHTIRGGAEVSEPAELLFYIQDSDDVYGLITFFPMENQKIESSPGERYLSLSFTRLGGTKGDVRLLYSVLYIPAGAVDPLQAKEGILNISRRNDLIFPEQKTQVTTKLPIRNDAFLQNGAHFLVQLETVELLNIIPLIPPISPRFGEICNISLLVTPAIANGEIGFLSNLPIILHEPEDFAAEVVYIPLHRDGTDGQATVYWSLKPSGFNSKAVTPDDIGPFNGSVLFLSGQSDTTINITIKGDDIPEMNETVTLSLDRVNVENQVLKSGYTSRDLIILENDDPGGVFEFSPASRGPYVIKEGESVELHIIRSRGSLVKQFLHYRVEPRDSNEFYGNTGVLEFKPGEREIVITLLARLDGIPELDEHYWVVLSSHGERESKLGSATIVNITILKNDDPHGIIEFVSDGLIVMINESKGDAIYSAVYDVVRNRGNFGDVSVSWVVSPDFTQDVFPVQGTVVFGDQEFSKNITIYSLPDEIPEEMEEFTVILLNGTGGAKVGNRTTATLRIRRNDDPIYFAEPRVVRVQEGETANFTVLRNGSVDVTCMVQYATKDGKATARERDFIPVEKGETLIFEVGSRQQSISIFVNEDGIPETDEPFYIILLNSTGDTVVYQYGVATVIIEANDDPNGIFSLEPIDKAVEEGKTNAFWILRHRGYFGSVSVSWQLFQNDSALQPGQEFYETSGTVNFMDGEEAKPIILHAFPDKIPEFNEFYFLKLVNISGGSPGPGGQLAETNLQVTVMVPFNDDPFGVFILDPECLEREVAEDVLSEDDMSYITNFTILRQQGVFGDVQLGWEILSSEFPAGLPPMIDFLLVGIFPTTVHLQQHMRRHHSGTDALYFTGLEGAFGTVNPKYHPSRNNTIANFTFSAWVMPNANTNGFIIAKDDGNGSIYYGVKIQTNESHVTLSLHYKTLGSNATYIAKTTVMKYLEESVWLHLLIILEDGIIEFYLDGNAMPRGIKSLKGEAITDGPGILRIGAGINGNDRFTGLMQDVRSYERKLTLEEIYELHAMPAKSDLHPISGYLEFRQGETNKSFIISARDDNDEEGEELFILKLVSVYGGARISEENTTARLTIQKSDNANGLFGFTGACIPEIAEEGSTISCVVERTRGALDYVHVFYTISQIETDGINYLVDDFANASGTITFLPWQRSEVLNIYVLDDDIPELNEYFRVTLVSAIPGDGKLGSTPTSGASIDPEKETTDITIKASDHPYGLLQFSTGLPPQPKDAMTLPASSVPHITVEEEDGEIRLLVIRAQGLLGRVTAEFRTVSLTAFSPEDYQNVAGTLEFQPGERYKYIFINITDNSIPELEKSFKVELLNLEGGVAELFRVDGSGSGDGDMEFFLPTIHKRASLGVASQILVTIAASDHAHGVFEFSPESLFVSGTEPEDGYSTVTLNVIRHHGTLSPVTLHWNIDSDPDGDLAFTSGNITFEIGQTSANITVEILPDEDPELDKAFSVSVLSVSSGSLGAHINATLTVLASDDPYGIFIFSEKNRPVKVEEATQNITLSIIRLKGLMGKVLVSYATLDDMEKPPYFPPNLARATQGRDYIPASGFALFGANQSEATIAISILDDDEPERSESVFIELLNSTLVAKVQSRSIPNSPRLGPKVETIAQLIIIANDDAFGTLQLSAPIVRVAENHVGPIINVTRTGGAFADVSVKFKAVPITAIAGEDYSIASSDVVLLEGETSKAVPIYVINDIYPELEESFLVQLMNETTGGARLGALTEAVIIIEASDDPYGLFGFQITKLIVEEPEFNSVKVNLPIIRNSGTLGNVTVQWVATINGQLATGDLRVVSGNVTFAPGETIQTLLLEVLADDVPEIEEVIQVQLTDASGGGTIGLDRIANIIIPANDDPYGTVAFAQMVYRVQEPLERSSCANITVRRSGGHFGRLLLFYSTSDIDVVALAMEEGQDLLSYYESPIQGVPDPLWRTWMNVSAVGEPLYTCATLCLKEQACSAFSFFSASEGPQCFWMTSWISPAVNNSDFWTYRKNMTRVASLFSGQAVAGSDYEPVTRQWAIMQEGDEFANLTVSILPDDFPEMDESFLISLLEVHLMNISASLKNQPTIGQPNISTVVIALNGDAFGVFVIYNISPNTSEDGLFVEVQEQPQTLVELMIHRTGGSLGQVAVEWRVVGGTATEGLDFIGAGEILTFAEGETKKTVILTILDDSEPEDDESIIVSLVYTEGGSRILPSSDTVRVNILANDNVAGIVSFQTASRSVIGHEGEILQFHVIRTFPGRGNVTVNWKIIGQNLELNFANFSGQLFFPEGSLNTTLFVHLLDDNIPEEKEVYQVILYDVRTQGVPPAGIALLDAQGYAAVLTVEASDEPHGVLNFALSSRFVLLQEANITIQLFINREFGSLGAINVTYTTVPGMLSLKNQTVGNLAEPEVDFVPIIGFLILEEGETAAAINITILEDDVPELEEYFLVNLTYVGLTMAASTSFPPRLDSEGLTAQVIIDANDGARGVIEWQQSRFEVNETHGSLTLVAQRSREPLGHVSLFVYAQNLEAQVGLDYIFTPMILHFADGERYKNVNIMILDDDIPEGDEKFQLILTNPSPGLELGKNTIALIIVLANDDGPGVLSFNNSEHFFLREPTALYVQESVAVLYIVREPAQGLFGTVTVQFIVTEVNSSNESKDLTPSKGYIVLEEGVRFKALQISAILDTEPEMDEYFVCTLFNPTGGARLGVHVQTLITVLQNQAPLGLFSISAVENRATSIDIEEANRTVYLNVSRTNGIDLAVSVQWETVSETAFGMRGMDVVFSVFQSFLDESASGWCFFTLENLIYGIMLRKSSVTVYRWQGIFIPVEDLNIENPKTCEAFNIGFSPYFVITHEERNEEKPSLNSVFTFTSGFKLFLVQTIIILESSQVRYFTSDSQDYLIIASQRDDSELTQVFRWNGGSFVLHQKLPVRGVLTVALFNKGGSVFLAISQANARLNSLLFRWSGSGFINFQEVPVSGTTEVEALSSANDIYLIFAENVFLGDQNSIDIFIWEMGQSSFRYFQSVDFAAVNRIHSFTPASGIAHILLIGQDMSALYCWNSERNQFSFVLEVPSAYDVASVTVKSLNSSKNLIALVGAHSHIYELAYISSHSDFIPSSGELIFEPGEREATIAVNILDDTVPEKEESFKVQLKNPKGGAEIGINDSVTITILSNDDAYGIVAFAQNSLYKQVEEMEQDSLVTLNVERLKGTYGRITIAWEADGSISDIFPTSGVILFTEGQVLSTITLTILADNIPELSEVVIVTLTRITTEGVEDSYKGATIDQDRSKSVITTLPNDSPFGLVGWRAASVFIRVAEPKENTTTLQLQIARDKGLLGDIAIHLRAQPNFLLHVDNQATENEDYVLQETIIIMKENIKEAHAEVSILPDDLPELEEGFIVTITEVNLVNSDFSTGQPSVRRPGMEIAEIMIEENDDPRGIFMFHVTRGAGEVITAYEVPPPLNVLQVPVVRLAGSFGAVNVYWKASPDSAGLEDFKPSHGILEFADKQVTAMIEITIIDDAEFELTETFNISLISVAGGGRLGDDVVVTVVIPQNDSPFGVFGFEEKTVMIDESLSSDDPDSYVTLTVVRSPGGKGTVRLEWTIDEKAKHNLSPLNGTLHFDETESQKTIVLHTLQDTVLEEDRRFTIQLISIDEVEISPVKGSASIIIRGDKRASGEVGIAPSSRHILIGEPSAKYNGTAIISLVRGPGILGEVTVFWRIFPPSVGEFAETSGKLTMRDEQSAVIVVIQALNDDIPEEKSFYEFQLTAVSEGGVLSESSSTANITVVASDSPYGRFAFSHEQLRVSEAQRVNITIIRSSGDFGHVRLWYKTMSGTAEAGLDFVPAAGELLFEAGEMRKSLHVEILDDDYPEGPEEFSLTITKVELQGRGYDFTIQENGLQIDQPPEIGNISIVRIIIMKNDNAEGIIEFDPKYTAFEVEEDVGLIMIPVVRLHGTYGYVTADFISQSSSASPGGVDYILHGSTVTFQHGQNLSFINISIIDDNESEFEEPIEILLTGATGGAVLGRHLVSRIIIAKSDSPFGVIRFLNQSKISIANPNSTMILSLVLERTGGLLGEIQVNWETVGPNSQEALLPQNRDIADPVSGLFYFGEGEGGVRTIILTIYPHEEIEVEETFIIKLHLVKGEAKLDSRAKDVTLTIQEFGDPNGVVQFAPETLSKKTYSEPLALEGPLLITFFVRRVKGTFGEIMVYWELSSEFDITEDFLSTSGFFTIADGESEASFDVHLLPDEVPEIEEDYVIQLVSVEGGAELDLEKSITWFSVYANDDPHGVFALYSDRQSILIGQNLIRSIQINITRLAGTFGDVAVGLRISSDHKEQPIVTENAERQLVVKDGATYKVDVVPIKNQVFLSLGSNFTLQLVTVMLVGGRFYGMPTILQEAKSAVLPVSEKAANSQVGFESTAFQLMNITAGTSHVMISRRGTYGALSVAWTTGYAPGLEIPEFIVVGNMTPTLGSLSFSHGEQRKGVFLWTFPSPGWPEAFVLHLSGVQSSAPGGAQLRSGFIVAEIEPMGVFQFSTSSRNIIVSEDTQMIRLHVQRLFGFHSDLIKVSYQTTAGSAKPLEDFEPVQNGELFFQKFQTEVDFEITIINDQLSEIEEFFYINLTSVEIRGLQKFDVNWSPRLNLDFSVAVITILDNDDLAGMDISFPETTVAVAVDTTLIPVETESTTYLSTSKTTTILQPTNVVAIVTEATGVSAIPEKLVTLHGTPAVSEKPDVATVTANVSIHGTFSLGPSIVYIEEEMKNGTFNTAEVLIRRTGGFTGNVSITVKTFGERCAQMEPNALPFRGIYGISNLTWAVEEEDFEEQTLTLIFLDGERERKVSVQILDDDEPEGQEFFYVFLTNPQGGAQIVEEKDDTGFAAFAMVIITGSDLHNGIIGFSEESQSGLELREGAVMRRLHLIVTRQPNRAFEDVKVFWRVTLNKTVVVLQKDGVNLVEELQSVSGTTTCTMGQTKCFISIELKPEKVPQVEVYFFVELYEATAGAAINNSARFAQIKILESDESQSLVYFSVGSRLAVAHKKATLISLQVARDSGTGLMMSVNFSTQELRSAETIGRTIISPAISGKDFVITEGTLVFEPGQRSTVLDVILTPETGSLNSFPKRFQIVLFDPKGGARIDKVYGTANITLVSDADSQAIWGLADQLHQPVNDDILNRVLHTISMKVATENTDEQLSAMMHLIEKITTEGKIQAFSVASRTLFYEILCSLINPKRKDTRGFSHFAEVTENFAFSLLTNVTCGSPGEKSKTILDSCPYLSILALHWYPQQINGHKFEGKEGDYIRIPERLLDVQDAEIMAGKSTCKLVQFTEYSSQQWFISGNNLPTLKNKVLSLSVKGQSSQLLTNDNEVLYRIYAAEPRIIPQTSLCLLWNQAAASWLSDSQFCKVVEETADYVECACSHMSVYAVYARTDNLSSYNEAFFTSGFICISGLCLAVLSHIFCARYSMFAAKLLTHMMAASLGTQILFLASAYASPQLAEESCSAMAAVTHYLYLCQFSWMLIQSVNFWYVLVMNDEHTERRYLLFFLLSWGLPAFVVILLIVILKGIYHQSMSQIYGLIHGDLCFIPNVYAALFTAALVPLTCLVVVFVVFIHAYQVKPQWKAYDDVFRGRTNAAEIPLILYLFALISVTWLWGGLHMAYRHFWMLVLFVIFNSLQGLYVFMVYFILHNQMCCPMKASYTVEMNGHPGPSTAFFTPGSGMPPAGGEISKSTQNLIGAMEEVPPDWERASFQQGSQASPDLKPSPQNGATFPSSGGYGQGSLIADEESQEFDDLIFALKTGAGLSVSDNESGQGSQEGGTLTDSQIVELRRIPIADTHL

SEQ ID NO: 91 - protein, 607 aa, Homo sapiens
MELVRRLMPLTLLILSCLAELTMAEAEGNASCTVSLGGANMAETHKAMILQLNPSENCTWTIERPENKSIRIIFSYVQLDPDGSCESENIKVFDGTSSNGPLLGQVCSKNDYVPVFESSSSTLTFQIVTDSARIQRTVFVFYYFFSPNISIPNCGGYLDTLEGSFTSPNYPKPHPELAYCVWHIQVEKDYKIKLNFKEIFLEIDKQCKFDFLAIYDGPSTNSGLIGQVCGRVTPTFESSSNSLTVVLSTDYANSYRGFSASYTSIYAENINTTSLTCSSDRMRVIISKSYLEAFNSNGNNLQLKDPTCRPKLSNVVEFSVPLNGCGTIRKVEDQSITYTNIITFSASSTSEVITRQKQLQIIVKCEMGHNSTVEIIYITEDDVIQSQNALGKYNTSMALFESNSFEKTILESPYYVDLNQTLFVQVSLHTSDPNLVVFLDTCRASPTSDFASPTYDLIKSGCSRDETCKVYPLFGHYGRFQFNAFKFLRSMSSVYLQCKVLICDSSDHQSRCNQGCVSRSKRDISSYKWKTDSIIGPIRLKRDRSASGNSGFQHETHAEETPNQPFNSVHLFSFMVLALNVVTVATITVRHFVNQRADYKYQKLQNY

SEQ ID NO: 92 - protein, 3708 aa, Homo sapiens
MAGKLRKSHIPGVSIWQLVEEIPEGCSTPDFEQKPVTSALPEGKNAVFRAVVCGEPRPEVRWQNSKGDLSDSSKYKISSSPGSKEHVLQINKLTGEDTDLYRCTAVNAYGEAACSVRLTVIEVGFRKNRKRHREPQEDLRKELMDFRKLLKKRAPPAPKKKMDLEQIWQLLMTADRKDYEKICLKYGIVDYRGMLRRLQEMKKEQEDKMAQYINTISSLRHIRVTKDGNAKFDLELDLKDSQSKIYLYKDGEMIPYGFNNQTKHCLRRLGKRYEFQIQDLRPEDSGIYQVKVEDAVVFSTELEASAIPPRVVVPLAETHCEEQGDAVFECTLSSPCPSAAWHFRHRLLHPSDKYEVYVSPDGLTHRLVVRGARFSDMGPYSLGTGLYTSSAWLVVEAGKDKDLQSTSADHKLQRQGAQASGAEESGSIESQGEKSREQGPRGGSLEGAGPASGLQHIASPDRDGLGRHGYSLMGDKGTADSAWGPGQEGEGFPVAEGSRATLPRENQSHREGGWARSLAERPHLQGESSESGLGLPEKQQQDRGRDSNSDECWRKAGGWEAGSSRLQAGGLGSSREGKEHRGDSGRQLDRHAPEQLWDARLGPGRGKSDLQGCQSDPVGSWPRGKQIEISQDDSLAEMDRGDAPSRERGRGIVVWGGGTGLGEAGDSNGAGGPGTLELTGGRGSGSKVGMAPESWGSQGGRDADYGEARGYWGSGELLEQIPGGKDFQEPSISGGRKFLLGDGSPEIKAEDSLQEADGICRGESVVTGSAYKTGPGGPGDPRGCEGVLQELRGRDGQETAWASGEVEYDPRSFQSSQGWTAGHRAAGGIGRIESKGTSPWDDTPSSLRKTGAHHGPGVLGPSGGQEGMGGIWVAGLTESGQGVDARSHWLSRAPGLGAQGSGGTLGDKKGLRGPGSIGSEPDFWNGSGSSRVKGPRGETGYKDGLEGPGRMESRYEGGLGYSREISSKSGAGYSYGSGVPGEMGSGHGAGCRVSPRAPAGVESEEGGGYRHGSGAPGGVWSGNEDSGPAGGGSGRVASLKNGSGGPDGAPMNDTRNWASACQAGMDPRGGHHSDGGLGSPGVTGSAGRGGLKAPGVVETVGMGCVEAEPESSGRIRPWGQTGNYGGFRASEALGAFGEGGYEDGSGGPGAMGPGSLRAGSKVGEGDGTRCPGAKASGAGAGYRDDTRHPESLAPHNGAASGSQWAYGAGNVLGYEDGSELPGPQGTGVRTAYGERSRGLGPRSTGPGGEAGFRDGSGGLQGMGSADGPGCRKGIGSSGEMGSVDKEGYKKDLGAPENMGSGSKADYRDGVGGSGAMGSMDEAGYRKDLGAPEGISSGSKADYRGGLQDSREAGSGSKADYSGGLKGSREIGSMDETDNRKDLGVPEGMGAGYRAGLRGPGEMGSLDESGHRNGIGGYGEMGSGYREDLGAPEGMGTGSKAGYRDGLRGSGEMRSMDEAGYRKNLGAPERMDSGSKAGYRGGLRGSGEMGLIEAGYRKDLGVSEGGGSGSKAGYRGGLGSGEMGSVDKAGYRKDLGASEAIGSGSKAGFTDGLGGSEEMGSVNKAGYRKDLGAPKGMGSGSKASFRDGLGGSGEMGSVNEAGYRKDLGVPEGIGSGSKAGFRDGLGGSEEMGSVNKAGYRKDLGAPKGIGSGSKAGFRDGLGSSGEMGSMDEAGYRKNLGAPEGIGSGSKAGFRDGLGSSVEMGSVNEAGYRKDLGAPEGMGSGSKAGFRDGLGGSGEMGSVNEAGYRKDLGAPKGIGSGSKADFRDALGSSGEMGSMDEAGYRKDLWAPEGIGSGSKAGFRDGLGSSVEMGSVNEAGYRKDLGAPEGMGSGSKAGFRDGLGGSGEMGSVNEAGYRKDLGAPKGIGSGSKADFRDALGSSGEMGSMDEAGYRKDLWAPEGIGSGSKAGFRDGLGSSVEMGSVNEAGYRKDLGAPEGMGSGSKEGFRDGLGGSEEMGSVNKAGYRKDLGAPKGMGSGSKEGFRDGLGGSEEMGSMDEAGYRKDLGAPEGIGSGSKAGFRDGLGGSEEMRSMDEAGYRKDLGAPERIGSGSKAGFRDGLGSSVEMGSVNEAGYRKDLGAPKGMGSGSKTGFRDGLGGSEEMESMDEAGYRKDLGAPEGIGSGSKAGFRDGLGSSTEMGSVNEAGYRKDLGAPKGMGSESKAGFRDGLGSSGEMGSMDEAGYRKDLGAPEGMGSGSKAGFRDGLGGSEEMGSVNKAGYRKDLGAPKGMGSGSKAGFRDGLGSSGEMGSMDEADYRKDLGAPEEMGSGSYTDYRNGLGSSGKISSGDEAGYKNVLGGSGRNPLGSEAGSRGSLEDSGYILSWNEAGSRQGFGGTSGMGSGSEVSYRGGSGGSGETGPEGKMGYGDGSGRLGVPGSLAGIGHEAGPRGHKAMGHRSGYWVASEGDTNSKDGPERARETRLVDGAGPGVEPGMAGMPGTAGGMAHRDSLRGTGVLGSQGGRQTLSDERGSTKDLGGYGTSGIPEASEAAGAKGKPDVKEWQDSSGTPGSSRDRGAPRVKDRSPDQAGIMGASGFLDGKGAVEGETWAGMAALGSGYERDIWKAGPGMTDRGRVAGQGGLASQGGGDSLLGGRRVGSGSSVGTGQDLDSGSMPGGRGKSTSGPADRQGTSNAWAPDWENQGFSQGSIDAGKQPAGSRASGSLQEKDAAFGGTHEGPGGFKGGEGAPGQEAAGGCRSPWSLDSKGSSPGRGSSVDAEDSGILGKGNSTEWGNALTPKPGESGPQGAWNGLDGPFGRKASRDRSGGTQDLSSQRGKGQRGGKRSLGEQGSLEAENGEVQGPGALKEDEGQGVEEAGRSGRRPGSLRSRSQAQSGAEVGGGKRRGADEAGSMGWQPMGENWGCLEEMLNEDQSREPPGHLGSRRSGKDGRLDIYGERRDATRSSTSRYKPGTGSFSKDAQGPMGHFSQGLADMEVQPGEAATLSCTLTSDLGPGTWFKDGVKLTTQDGVIFKQDGLVHSLFITHVQGTQAGRYTFVAGDQQSEATLTVQDSPTIAPDVTEKLREPLVVKAGKPVIVKIPFQSHLPIQAAWRKDGAEVVGSSDREAQVDLGDGYTRLCLPSAGRKDCGQYSVTLRSEGGSVQAELTLQVIDKPDPPQGPMEVQDCHRAGVCLRWRPPRDNGGRTVECYVVERRQAGRSTWLKVGEAPADSTTFTDAHVEPGRKYTFRVRAVTSEGAGEALESEEILVAPEALPKAPSAPAILSASSQGITLTWTAPRGPGSAHILGYLIERRKKGSNTWTAVNDQPVPERRWTVADVRQGCQYEFRVTAVAPSGPGEPGPPSDAVFARDPMRPPGLVRNLQVTDRSNTSITLSWAGPDTQEGDEAQGYVVELCSSDSLQWLPCHVGTVPVTTYTAKGLRPGEGYFVRVTAVNEGGQSQPSALDTLVQAMPVTVCPKFLVDSSTKDLLTVKVGDTVRVPVSFEAMPMPEVTWLKDGLPLPKRSVTVTKDGLTQLLIPVAGLSDSGLYTVVLRTLQGKEVAHSFRIRVAACPQAPGPIHLQENVPGTVTAEWEPSPDEAQDVPLHYAVFTRSSAHGPWHEAADRIHTNRFTLLGILPGHEYHFRVVAKNELGASKPSDTSQPWCIPRQRDRFTVKAPCYREPDLSQKPRFLVGLRSHLLPQGCECCMSCAVQGSPRPHVTWFKNDRSLEGNPAVYSTDLLGVCSLTIPSVSPKDSGEYKAVAENTLGQAVSTATLIVIEPST

SEQ ID NO: 93 - protein, 8797 aa, Homo sapiens
MATSRGASRCPRDIANVMQRLQDEQEIVQKRTFTKWINSHLAKRKPPMVVDDLFEDMKDGVKLLALLEVLSGQKLPCEQGRRMKRIHAVANIGTALKFLEGRKIKLVNINSTDIADGRPSIVLGLMWTIILYFQIEELTSNLPQLQSLSSSASSVDSIVSSETPSPPSKRKVTTKIQGNAKKALLKWVQYTAGKQTGIEVKDFGKSWRSGVAFHSVIHAIRPELVDLETVKGRSNRENLEDAFTIAETELGIPRLLDPEDVDVDKPDEKSIMTYVAQFLKHYPDIHNASTDGQEDDEILPGFPSFANSVQNFKREDRVIFKEMKVWIEQFERDLTRAQMVESNLQDKYQSFKHFRVQYEMKRKQIEHLIQPLHRDGKLSLDQALVKQSWDRVTSRLFDWHIQLDKSLPAPLGTIGAWLYRAEVALREEITVQQVHEETANTIQRKLEQHKDLLQNTDAHKRAFHEIYRTRSVNGIPVPPDQLEDMAERFHFVSSTSELHLMKMEFLELKYRLLSLLVLAESKLKSWIIKYGRRESVEQLLQNYVSFIENSKFFEQYEVTYQILKQTAEMYVKADGSVEEAENVMKFMNETTAQWRNLSVEVRSVRSMLEEVISNWDRYGNTVASLQAWLEDAEKMLNQSENAKKDFFRNLPHWIQQHTAMNDAGNFLIETCDEMVSRDLKQQLLLLNGRWRELFMEVKQYAQADEMDRMKKEYTDCVVTLSAFATEAHKKLSEPLEVSFMNVKLLIQDLEDIEQRVPVMDAQYKIITKTAHLITKESPQEEGKEMFATMSKLKEQLTKVKECYSPLLYESQQLLIPLEELEKQMTSFYDSLGKINEIITVLEREAQSSALFKQKHQELLACQENCKKTLTLIEKGSQSVQKFVTLSNVLKHFDQTRLQRQIADIHVAFQSMVKKTGDWKKHVETNSRLMKKFEESRAELEKVLRIAQEGLEEKGDPEELLRRHTEFFSQLDQRVLNAFLKACDELTDILPEQEQQGLQEAVRKLHKQWKDLQGEAPYHLLHLKIDVEKNRFLASVEECRTELDRETKLMPQEGSEKIIKEHRVFFSDKGPHHLCEKRLQLIEELCVKLPVRDPVRDTPGTCHVTLKELRAAIDSTYRKLMEDPDKWKDYTSRFSEFSSWISTNETQLKGIKGEAIDTANHGEVKRAVEEIRNGVTKRGETLSWLKSRLKVLTEVSSENEAQKQGDELAKLSSSFKALVTLLSEVEKMLSNFGDCVQYKEIVKNSLEELISGSKEVQEQAEKILDTENLFEAQQLLLHHQQKTKRISAKKRDVQQQIAQAQQGEGGLPDRGHEELRKLESTLDGLERSRERQERRIQVTLRKWERFETNKETVVRYLFQTGSSHERFLSFSSLESLSSELEQTKEFSKRTESIAVQAENLVKEASEIPLGPQNKQLLQQQAKSIKEQVKKLEDTLEEDIKTMEMVKTKWDHFGSNFETLSVWITEKEKELNALETSSSAMDMQISQIKVTIQEIESKLSSIVGLEEEAQSFAQFVTTGESARIKAKLTQIRRYGEELREHAQCLEGTILGHLSQQQKFEENLRKIQQSVSEFEDKLAVPIKICSSATETYKVLQEHMDLCQALESLSSAITAFSASARKVVNRDSCVQEAAALQQQYEDILRRAKERQTALENLLAHWQRLEKELSSFLTWLERGEAKASSPEMDISADRVKVEGELQLIQALQNEVVSQASFYSKLLQLKESLFSVASKDDVKMMKLHLEQLDERWRDLPQIINKRINFLQSVVAEHQQFDELLLSFSVWIKLFLSELQTTSEISIMDHQVALTRHKDHAAEVESKKGELQSLQGHLAKLGSLGRAEDLHLLQGKAEDCFQLFEEASQVVERRQLALSHLAEFLQSHASLSGILRQLRQTVEATNSMNKNESDLIEKDLNDALQNAKALESAAVSLDGILSKAQYHLKIGSSEQRTSCRATADQLCGEVERIQNLLGTKQSEADALAVLKKAFQDQKEELLKSIEDIEERTDKERLKEPTRQALQQRLRVFNQLEDELNSHEHELCWLKDKAKQIAQKDVAFAPEVDREINRLEVTWDDTKRLIHENQGQCCGLIDLMREYQNLKSAVSKVLENASSVIVTRTTIKDQEDLKWAFSKHETAKNKMNYKQKDLDNFTSKGKHLLSELKKIHSSDFSLVKTDMESTVDKWLDVSEKLEENMDRLRVSLSIWDDVLSTRDEIEGWSNNCVPQMAENISNLDNHLRAEELLKEFESEVKNKALRLEELHSKVNDLKELTKNLETPPDLQFIEADLMQKLEHAKEITEVAKGTLKDFTAQSTQVEKFINDITTWFTKVEESLMNCAQNETCEALKKVKDIQKELQSQQSNISSTQENLNSLCRKYHSAELESLGRAMTGLIKKHEAVSQLCSKTQASLQESLEKHFSESMQEFQEWFLGAKAAAKESSDRTGDSKVLEAKLHDLQNILDSVSDGQSKLDAVTQEGQTLYAHLSKQIVSSIQEQITKANEEFQAFLKQCLKDKQALQDCASELGSFEDQHRKLNLWIHEMEERFNTENLGESKQHIPEKKNEVHKVEMFLGELLAARESLDKLSQRGQLLSEEGHGAGQEGRLCSQLLTSHQNLLRMTKEKLRSCQVALQEHEALEEALQSMWFWVKAIQDRLACAESTLGSKDTLEKRLSQIQDILLMKGEGEVKLNMAIGKGEQALRSSNKEGQRVIQTQLETLKEVWADIMSSSVHAQSTLESVISQWNDYVERKNQLEQWMESVDQKIEHPLQPQPGLKEKFVLLDHLQSILSEAEDHTRALHRLIAKSRELYEKTEDESFKDTAQEELKTQFNDIMTVAKEKMRKVEEIVKDHLMYLDAVHEFTDWLHSAKEELHRWSDMSGDSSATQKKLSKIKELIDSREIGASRLSRVESLAPEVKQNTTASGCELMHTEMQALRADWKQWEDSVFQTQSCLENLVSQMALSEQEFSGQVAQLEQALEQFSALLKTWAQQLTLLEGKNTDEEIVECWHKGQEILDALQKAEPRTEDLKSQLNELCRFSRDLSTYSGKVSGLIKEYNCLCLQASKGCQNKEQILQQRFRKAFRDFQQWLVNAKITTAKCFDIPQNISEVSTSLQKIQEFLSESENGQHKLNMMLSKGELLSTLLTKEKAKGIQAKVTAAKEDWKNFHSNLHQKESALENLKIQMKDFEVSAEPIQDWLSKTEKMVHESSNRLYDLPAKRREQQKLQSVLEEIHCYEPQLNRLKEKAQQLWEGQAASKSFRHRVSQLSSQYLALSNLTKEKVSRLDRIVAEHNQFSLGIKELQDWMTDAIHMLDSYCHPTSDKSVLDSRTLKLEALLSVKQEKEIQMKMIVTRGESVLQNTSPEGIPTIQQQLQSVKDMWASLLSAGIRCKSQLEGALSKWTSYQDGVRQFSGWMDSMEANLNESERQHAELRDKTTMLGKAKLLNEEVLSYSSLLETIEVKGAGMTEHYVTQLELQDLQERYRAIQERAKEAVTKSEKLVRLHQEYQRDLKAFEVWLGQEQEKLDQYSVLEGDAHTHETTLRDLQELQVHCAEGQALLNSVLHTREDVIPSGIPQAEDRALESLRQDWQAYQHRLSETRTQFNNVVNKLRLMEQKFQQVDEWLKTAEEKVSPRTRRQSNRATKEIQLHQMKKWHEEVTAYRDEVEEVGARAQEILDESHVNSRMGCQATQLTSRYQALLLQVLEQIKFLEEEIQSLEESESSLSSYSDWYGSTHKNFKNVATKIDKVDTVMMGKKLKTLEVLLKDMEKGHSLLKSAREKGERAVKYLEEGEAERLRKEIHDHMEQLKELTSTVRKEHMTLEKGLHLAKEFSDKCKALTQWIAEYQEILHVPEEPKMELYEKKAQLSKYKSLQQTVLSHEPSVKSVREKGEALLELVQDVTLKDKIDQLQSDYQDLCSIGKEHVFSLEAKVKDHEDYNSELQEVEKWLLQMSGRLVAPDLLETSSLETITQQLAHHKAMMEEIAGFEDRLNNLQMKGDTLIGQCADHLQAKLKQNVHAHLQGTKDSYSAICSTAQRMYQSLEHELQKHVSRQDTLQQCQAWLSAVQPDLEPSPQPPLSRAEAIKQVKHFRALQEQARTYLDLLCSMCDLSNASVKTTAKDIQQTEQTIEQKLVQAQNLTQGWEEIKHLKSELWIYLQDADQQLQNMKRRHSELELNIAQNMVSQVKDFVKKLQSKQASVNTIIEKVNKLTKKEESPEHKEINHLNDQWLDLCRQSNNLCLQREEDLQRTRDYHDCMNVVEVFLEKFTTEWDNLARSDAESTAVHLEALKKLALALQERKYAIEDLKDQKQKMIEHLNLDDKELVKEQTSHLEQRWFQLEDLIKRKIQVSVTNLEELNVVQSRFQELMEWAEEQQPNIAEALKQSPPPDMAQNLLMDHLAICSELEAKQMLLKSLIKDADRVMADLGLNERQVIQKALSDAQSHVNCLSDLVGQRRKYLNKALSEKTQFLMAVFQATSQIQQHERKIMFREHICLLPDDVSKQVKTCKSAQASLKTYQNEVTGLWAQGRELMKEVTEQEKSEVLGKLQELQSVYDSVLQKCSHRLQELEKNLVSRKHFKEDFDKACHWLKQADIVTFPEINLMNESSELHTQLAKYQNILEQSPEYENLLLTLQRTGQTILPSLNEVDHSYLSEKLNALPRQFNVIVALAKDKFYKVQEAILARKEYASLIELTTQSLSELEAQFLRMSKVPTDLAVEEALSLQDGCRAILDEVAGLGEAVDELNQKKEGFRSTGQPWQPDKMLHLVTLYHRLKRQTEQRVSLLEDTTSAYQEHEKMCQQLERQLKSVKEEQSKVNEETLPAEEKLKMYHSLAGSLQDSGIVLKRVTIHLEDLAPHLDPLAYEKARHQIQSWQGELKLLTSAIGETVTECESRMVQSIDFQTEMSRSLDWLRRVKAELSGPVYLDLNLQDIQEEIRKIQIHQEEVQSSLRIMNALSHKEKEKFTKAKELISADLEHSLAELSELDGDIQEALRTRQATLTEIYSQCQRYYQVFQAANDWLEDAQELLQLAGNGLDVESAEENLKSHMEFFSTEDQFHSNLEELHSLVATLDPLIKPTGKEDLEQKVASLELRSQRMSRDSGAQVDLLQRCTAQWHDYQKAREEVIELMNDTEKKLSEFSLLKTSSSHEAEEKLSEHKALVSVVNSFHEKIVALEEKASQLEKTGNDASKATLSRSMTTVWQRWTRLRAVAQDQEKILEDAVDEWTGFNNKVKKATEMIDQLQDKLPGSSAEKASKAELLTLLEYHDTFVLELEQQQSALGMLRQQTLSMLQDGAAPTPGEEPPLMQEITAMQDRCLNMQEKVKTNGKLVKQELKDREMVETQINSVKCWVQETKEYLGNPTIEIDAQLEELQILLTEATNHRQNIEKMAEEQKEKYLGLYTILPSELSLQLAEVALDLKIRDQIQDKIKEVEQSKATSQELSRQIQKLAKDLTTILTKLKAKTDNVVQAKTDQKVLGEELDGCNSKLMELDAAVQKFLEQNGQLGKPLAKKIGKLTELHQQTIRQAENRLSKLNQAASHLEEYNEMLELILKWIEKAKVLAHGTIAWNSASQLREQYILHQTLLEESKEIDSELEAMTEKLQYLTSVYCTEKMSQQVAELGRETEELRQMIKIRLQNLQDAAKDMKKFEAELKKLQAALEQAQATLTSPEVGRLSLKEQLSHRQHLLSEMESLKPKVQAVQLCQSALRIPEDVVASLPLCHAALRLQEEASRLQHTAIQQCNIMQEAVVQYEQYEQEMKHLQQLIEGAHREIEDKPVATSNIQELQAQISRHEELAQKIKGYQEQIASLNSKCKMLTMKAKHATMLLTVTEVEGLAEGTEDLDGELLPTPSAHPSVVMMTAGRCHTLLSPVTEESGEEGTNSEISSPPACRSPSPVANTDASVNQDIAYYQALSAERLQTDAAKIHPSTSASQEFYEPGLEPSATAKLGDLQRSWETLKNVISEKQRTLYEALERQQKYQDSLQSISTKMEAIELKLSESPEPGRSPESQMAEHQALMDEILMLQDEINELQSSLAEELVSESCEADPAEQLALQSTLTVLAERMSTIRMKASGKRQLLEEKLNDQLEEQRQEQALQRYRCEADELDSWLLSTKATLDTALSPPKEPMDMEAQLMDCQNMLVEIEQKVVALSELSVHNENLLLEGKAHTKDEAEQLAGKLRRLKGSLLELQRALHDKQLNMQGTAQEKEESDVDLTATQSPGVQEWLAQARTTWTQQRQSSLQQQKELEQELAEQKSLLRSVASRGEEILIQHSAAETSGDAGEKPDVLSQELGMEGEKSSAEDQMRMKWESLHQEFSTKQKLLQNVLEQEQEQVLYSRPNRLLSGVPLYKGDVPTQDKSAVTSLLDGLNQAFEEVSSQSGGAKRQSIHLEQKLYDGVSATSTWLDDVEERLFVATALLPEETETCLFNQEILAKDIKEMSEEMDKNKNLFSQAFPENGDNRDVIEDTLGCLLGRLSLLDSVVNQRCHQMKERLQQILNFQNDLKVLFTSLADNKYIILQKLANVFEQPVAEQIEAIQQAEDGLKEFDAGIIELKRRGDKLQVEQPSMQELSKLQDMYDELMMIIGSRRSGLNQNLTLKSQYERALQDLADLLETGQEKMAGDQKIIVSSKEEIQQLLDKHKEYFQGLESHMILTETLFRKIISFAVQKETQFHTELMAQASAVLKRAHKRGVELEYILETWSHLDEDQQELSRQLEVVESSIPSVGLVEENEDRLIDRITLYQHLKSSLNEYQPKLYQVLDDGKRLLISISCSDLESQLNQLGECWLSNTNKMSKELHRLETILKHWTRYQSESADLIHWLQSAKDRLEFWTQQSVTVPQELEMVRDHLNAFLEFSKEVDAQSSLKSSVLSTGNQLLRLKKVDTATLRSELSRIDSQWTDLLTNIPAVQEKLHQLQMDKLPSRHAISEVMSWISLMENVIQKDEDNIKNSIGYKAIHEYLQKYKGFKIDINCKQLTVDFVNQSVLQISSQDVESKRSDKTDFAEQLGAMNKSWQILQGLVTEKIQLLEGLLESWSEYENNVQCLKTWFETQEKRLKQQHRIGDQASVQNALKDCQDLEDLIKAKEKEVEKIEQNGLALIQNKKEDVSSIVMSTLRELGQTWANLDHMVGQLKILLKSVLDQWSSHKVAFDKINSYLMEARYSLSRFRLLTGSLEAVQVQVDNLQNLQDDLEKQERSLQKFGSITNQLLKECHPPVTETLTNTLKEVNMRWNNLLEEIAEQLQSSKALLQLWQRYKDYSKQCASTVQQQEDRTNELLKAATNKDIADDEVATWIQDCNDLLKGLGTVKDSLFFLHELGEQLKQQVDASAASAIQSDQLSLSQHLCALEQALCKQQTSLQAGVLDYETFAKSLEALEAWIVEAEEILQGQDPSHSSDLSTIQERMEELKGQMLKFSSMAPDLDRLNELGYRLPLNDKEIKRMQNLNRHWSLISSQTTERFSKLQSFLLQHQTFLEKCETWMEFLVQTEQKLAVEISGNYQHLLEQQRAHELFQAEMFSRQQILHSIIIDGQRLLEQGQVDDRDEFNLKLTLLSNQWQGVIRRAQQRRGIIDSQIRQWQRYREMAEKLRKWLVEVSYLPMSGLGSVPIPLQQARTLFDEVQFKEKVFLRQQGSYILTVEAGKQLLLSADSGAEAALQAELAEIQEKWKSASMRLEEQKKKLAFLLKDWEKCEKGIADSLEKLRTFKKKLSQSLPDHHEELHAEQMRCKELENAVGSWTDDLTQLSLLKDTLSAYISADDISILNERVELLQRQWEELCHQLSLRRQQIGERLNEWAVFSEKNKELCEWLTQMESKVSQNGDILIEEMIEKLKKDYQEEIAIAQENKIQLQQMGERLAKASHESKASEIEYKLGKVNDRWQHLLDLIAARVKKLKETLVAVQQLDKNMSSLRTWLAHIESELAKPIVYDSCNSEEIQRKLNEQQELQRDIEKHSTGVASVLNLCEVLLHDCDACATDAECDSIQQATRNLDRRWRNICAMSMERRLKIEETWRLWQKFLDDYSRFEDWLKSSERTAAFPSSSGVIYTVAKEELKKFEAFQRQVHECLTQLELINKQYRRLARENRTDSACSLKQMVHEGNQRWDNLQKRVTSILRRLKHFIGQREEFETARDSILVWLTEMDLQLTNIEHFSECDVQAKIKQLKAFQQEISLNHNKIEQIIAQGEQLIEKSEPLDAAIIEEELDELRRYCQEVFGRVERYHKKLIRLPLPDDEHDLSDRELELEDSAALSDLHWHDRSADSLLSPQPSSNLSLSLAQPLRSERSGRDTPASVDSIPLEWDHDYDLSRDLESAMSRALPSEDEEGQDDKDFYLRGAVGLSGDHSALESQIRQLGKALDDSRFQIQQTENIIRSKTPTGPELDTSYKGYMKLLGECSSSIDSVKRLEHKLKEEEESLPGFVNLHSTETQTAGVIDRWELLQAQALSKELRMKQNLQKWQQFNSDLNSIWAWLGDTEEELEQLQRLELSTDIQTIELQIKKLKELQKAVDHRKAIILSINLCSPEFTQADSKESRDLQDRLSQMNGRWDRVCSLLEEWRGLLQDALMQCQGFHEMSHGLLLMLENIDRRKNEIVPIDSNLDAEILQDHHKQLMQIKHELLESQLRVASLQDMSCQLLVNAEGTDCLEAKEKVHVIGNRLKLLLKEVSRHIKELEKLLDVSSSQQDLSSWSSADELDTSGSVSPTSGRSTPNRQKTPRGKCSLSQPGPSVSSPHSRSTKGGSDSSLSEPGPGRSGRGFLFRVLRAALPLQLLLLLLIGLACLVPMSEEDYSCALSNNFARSFHPMLRYTNGPPPL

SEQ ID NO: 94 - protein, 7081 aa, Homo sapiens
MSKQYYSFKKGVGSGLEDNTFMTLWDFLESWIIQNDWVAIFFIILLGIIFEIILMKACASFWKKPTLPEKGSSDVQETEDSCPKSRKLAPENWSVINSSSGERVGTFLEKRITSSLTSEEKECNFEDRILFSREILWSGTSESEDQVSPSSESHVPSSNGISSSLPLFYSEVEETCLSHTEHPDREYETIQFSSKKLFSMMKTNKNKNSGFSSDLSFSASRFTVENEDLDVAPCPLAHLFLSRDQVRLLEENVRNQIPSKPKTKLGSRTTYQCSRSQESLNQNQPSVGMVISVQAQDSFPGQNAFQNQGLYEVQFTSQAQYINHNQESIKSQPESKASNFAQPEDVMKKPFSSSTQDSFQSQDLDRNQHFVEVPSIVEAKYSVKGLESDEHLGEDQHCVWFIDSNKVKYSIKGQDTIFKNAEFLVLTLNPNLVTEDMPQLRSVKAQGQQQIVSSELNQDSVYSSVPLLSTIKGQKNRRKTPDSKSKLSLNVPSLKAKKTPTSQVFQITVCHTLKNRNELGCKNNTEKKELHERKDISDIALHLISVSKLILPYVKNYSRKQLVKVMPGLIKCGHFLQKQNKSPDTEKINYAGPLEETGISDITKKEKEYDKENKRLKNISPKMLPQLEQSFMVNTVQLKAPCLLVETNGKSKESLKDSITQAKGIGITEFHVLNSKKPFDLHIPKHKTSLEEAISKPMQKLVSSPEMESNNRMKIQEDLQSSENSHLQLSNGEELPTSTPKTQRCFPRENTQKQKDFLELVLELSNVGLLISPGSKMHKSSEELEAIKIQVNTESVNLKESKPLILNVTEDSDLRESEELECNTGSNITNMHQDKETSDAFHSATYTTISQLPDTETHSISKAKADTLRIIRLSHSASKQEKLPDEKETQNAEYIDKSCTFKKPQQCDRKEQEKEANSELTQGFRFSIHLKQKPKYVKFQMEQISSGSSKAPNKEQEVQPQTLSTQTILENSPCPMMDPFQVEKVKQSTDRPTDRESAGDPKNPLTMPENLPVGELLIETTEYSVPFGGNLQKTTDSHIAEEKEDVKRYLPAVALGSFNNHLLTLPYFKRQEIKKKLSETKSVLSVKYVIMKVKKPAISLMPYINICGTSNHRKKMGGNFEIIIKQILQDKIAAGMLLNVIYPPMSILPNTRMYSRLNAENHSHIKLVQEESQIEREEKYPYFINEGNESQNTLDAKLQDEVKGVKETLPKAVLHDSCNLGLDAHLEKEIKTEKEMHQPIPFTETIIESVVSPIMELSHAENVKSTQKTQTDCKCTADSETPSPISGKSLIGDPLNQTRESYIPSNGSDTREMGYCFAEEKTEIPKDLPATSPETFNYCTPVLSCSKVMKKRVTFALTTSTAKPKCVNTKAVKPSISETVSVTSHRKKSELDFKTKFKKINQTKGLVPECLNTLCSPMHSRLQREFCLPASQLKQGETADKTYTDVFAKNSISHDREEKLQDGKEEEHKVLLEAAPQLSQHLGSEAGQMKEIHLESDPVLNCLTLELHINGQRLQHQTGFEQTTLETSLQMGPLEAEELQKANETENDIKVLGGPKIPPPKALQALENSDGLILNAYQKDNELVKSDEELNQPGSTNIQVQPQTHFTQTILKSTSCPTLDQFPFEKVESHVRFSPLKSGEAKVDEIIFYAREGGISSDSSHQKEQAGGTEKKETAIFGSCMPALSTPKTTRNLKQFSDMKTLVNPKCGIIKAKKPSISYMLNIRAGAGPKRRKELSCNLTTKMKELHQGKKGVDETYAFLTMTPDINKYSKVETEKDTLREKRLSSTQVKQDTSPHEDSITSRDIKETLLQDEEQEERKQEALLKVIPQHLQHFMFRSGQGKDLDFHKLENQGSRKILFVTKQDVPQQLQPAEPIQREETKKCLQTQNGTICTVNSKLLPLKSEDSVNGEVLTGAIKRGVPTDRKCMGEQHNSGKGEKAEFNKDLQATVLELQKSPHGGEAQKANLTDMESGSSNAMNMNVQHEREDKNIQKMLTESVPCYSQHLRFSTHQMKDPDPCKSGSEPKSPEGRSWNLSHIVQKTKQETHFRETVLEPISGYMMKQSPHMQEGIKCMEGLKTSFPKTGKSKIGSIPRDTPWDENPRRKWDSSISEKTAWNQKNLQTVLKPLDFSSLMSSEYESRSYTLEFIGKKSMSPKCVTLKAKQLRILQLFNIIRYSTENHRKKKQHRFKYKMKGKQWYTSIGEALLSATEYAKSTTSKSMIDKLLYNTAARCILSNRTRRQNLDGHITEEKEEVQENVAAIFLGLLDFFMPVLSDSKNQRNTAQLSEKEIIFNAKCLTMKEKKSSISQIHKINRESTRKHRKKCKSYLKTVSNRKCQENHGHITEEEEEVQENSPATFLGPLDFFMPVLSDSKNQINTIQLSERKIILNPKCLTMKEKKPPISQIHKISGQFTTKHRKKLESNLKTKLKAMWQGENVADTFPNTTSFTPDSSDIKRQSGFQTEIDMRISGLSHTQPTQIESLAEGIARYSDPIDKRRTSNLVKGAKLHDRESGEEKQEHLTEMDPFYAENFMANTYLRKDRHLGKSEDVLLGETFFSKSQIYKGNSEKNVKIEKNKNGKESLKVGLARMEKSDNCAELSEATDDAISNKYDKQNIGHSVLKENAFCNLAAIVPDSVGRHSPASEEMKRQNGRLKMADRSSPQGRPLQAKQSAVSQSPDTAGYAVVSNNKEQKQNFKAQKTEAEVDLIDQEAKINVAEEFNPESVFFSKIHPLQIENKKEFKTADWKTRADPKTFALPKKQQELCVSGTIWSYPNPYTSISPKIIRHKDKAKTADVESTMHTKQIKLKAKRITVSQLLEYGTASNKKELRGNIQQQKSFQLSKNAVHRVLKAVYDSGYCVSSIKKLTEVKMEKDKPKDRTCILPQPKLEKPLKEMQRSLSGCTDMSSILRKQEQDIREKEQKHQSISEDISQYYIGPLRISSQQINYSSFDAPRIRTDEELEFLIAQRAKEKDVGIAKHSVSIPWEREGSKRLDIPLNSKGQNIFFTELDTSQQKTCQEQELLKQEDISMTNLGSMACPIMEPLHLENTGKVTEEEDVYINRKISSHVLGKEGLKETDIFVGSKGQKFLCTNSEVQHKVPAEQKEQVNPDHVPESILDSESFLSKDPLHLKQAVNTARKENVTISESFNENLWGKEQSKLDITLKSNRQKMDFSKKLRMKHLSNYYQNKENILESVLPCILHQLYIENPKKEGSAEEIMSSKVLSPMVEKASHEVGIPVDQPPCSEGIHLNIKGRKEHPQESTHEAFPASVSHSLMDVLQIKSPKVKKALKAINSLGYLTSNTKGIGLLFPRQAEKEEKYTYKALPKPASHSKTDLFQFNASMQQEKLDAMDIPHYDYLTSQTREAVKQMDVIVGYTQNSKKRQDLLKTGQKWQYLPISYENFWEHISCPQKYPCLLQHLMPQEKEALSEGGNLSSRTPGLDLFSADQLSTITKNRLEWIVPLISPRQMKKQDSMLPLGSYHKTIKYASLLFPKGMKSSDGVQVFDLISNNSSPKLRLGKKIETQKANEKVQKEVCLPITLHSLSASMPILQESKGQKDSVEQVIRKGVICHKRRTSKWKKSVFSHILNTSDCGASSNRLEMQWNMTDKMVNVKHRMSEIDLVAAKICESILSLPHFKLNKETIDGVISSNVKSTKQHISQGKNDRVKAMDMKRIKSPNIILKPRKSSLSHILSIKEFPLLLDIIKQEGKMQEGKGKSSMKLTNLCTSLPSLSHSNSNSRTKAGKDKSGTLKGCLPPLKLQASSNARRVSSAESINRDSLSNVIESKCFPQKKKEDRENIVDVKDVMGLKCITLKGKKSLFRHLLHGKEPQRSNKKLEKMTQEDESNLNVVQNKLCASILSPPHLEWNPRIKEVYMRGITRFCLSSSTQQELSDTMEKCEQPIDDSLSSIEKAKHMPQKDKDRVEKALEKIMHSKRIALEVKQPSIFQELELNIKEKGGKIQEDKEVEIWSKPFASISFLPYSKVGTIEGEEAMRIKMRSSFSQPNLQESSDTEKTAYEKCISDNISNSVKKALESILQKEQRQKMEKIRALKKMKSSISQGIQLDIKEQEKRIEHIKGEPSVLLTNACASIPSPSHLQLDTRREKAEYVTEITRYYLPELSHQKSSEAGEKADGVASKGDITIKVQKAKDYMQQKEDDEVKISAKKDIMHPEDKGLKAKKALSQDLPLNTKEPGKMDQEAQEQGKEDREGEEQGKEDRRGAGQEKVDREDKEQGKMDHEVEEQQKADGVGIEQGKMDGDKNEQERVLFLYLPSNSSLTHYILDTRIEGEEDQQGIIRPGILQPRHQKSSETGKKANGVPSEGDSASEVQKAKDYMQQKEEDEVKISAEKDLMHPEDKDLKGKKALSQNLPLNPKEPGKRDGEGQEQGKEDGEGEEQGNRDGETEEQQQADGVGTEQEKRDGHKSKQETVLFLHLPSESSLTCYELNTRKEGEEDLQGIIKSATLQLRQQKSFDAGKIAHTKSFGVDSSNDVKTVQEYKPQKEVDRGKTVSVDYIMQPEGTIFEAEQLSLPHTLNIPGSSGSKTREVLTNIKEKLRHVQERKSELDVFLTIPSLSHCKLDKRTAGKKEEQGVTRSFLPPSWHMESSDTGKLKYTLSYLNDITGDSNRTKYMAQIQKDKANISEKSVMHPEYIAVKAEKSPLSHILKTKELQVNISQQGEKAQEGEVEIVVLLSKTCPFVTSSAFLELDSIKEEEGEPRITRSFMPHLEIQESLPSRQTAPTKPTESLVKKEKQLLPQKEDRVQTVSMHGLMHPNGAVFKAKTSAPPQVFSITEHSPLSKRKEPQWGMKERAGQKQDRTGRPHVILTKTHPFMPSLSHHRFSPSQPKLPISSGAGKSRLANSNEGISSHKVILKANQQMPYKEAKDRVKIEGREGRILPKRIHLRAEALPLALLCNGKNYSLHIEEQGEGVQESKKEPGVVPRKSASFPPPPFYLNCDTRRNEKEGTLGKTQFSFPPLKIQDSSDSGKKAYTESLHGYTLSNSKGPVQPTAQGEEKGGLRIDMEDKMLPKCTDLKAKQLLLSDILNTKKLQWKSKEQKRKIQEDKNKQVKGLPSINTSLLTPPYLKFDTTEGQENVIRIAKVSLPQSRSKESSDAGRIACPEATHGELSSDVKQLKAHLLQKEEKDREKVADMTSVLDPNKMYLKAKKSPVLHTHSFSDLQWKTREQEEEKVQKVKSGPGVMLSKSPSRSSPLHLNVNTGFQEESIPILTRPSFPLVKLQVSPDTEGGTCIRPIAGDILIYLQKGKHVSQNKEEDDVQIVSILIFPKHQEEKVQECEGEPGVVLTKSTSLPSLSQLELDKETHLGNEMLRLKRPILRRISHIGETVHRESVVGDIPKDVKNEKQHIPQKEERNQKKIIDMRGTDITLKSKKSPRSCMLHRTELHVNIGGQGRKEHEGQDKPPGMIQRKMCILFSKPLPSNLKLERATHADEERLGGKTSFVLPLMPSALPDTEKTADAEARSGDVRKGKPHRSQKENRHEVKTIDMRFRIHCQEARISPMSHILNAKELVLNINKLEKKVHKDKDEACVVLSRTFLSIPSAPPLYLDSGNKTDKDTPGITGSSCPQRTLHVPSNTQKITNRDSVEGVDKNVVKQAEQYVPRPEAEQQLTSNFMISVQQRNQPSRVRSEEDLNQLVLNSRDEDIYFTGFGTIRSGKRPEWLFTGKKAQPVKYKTETLTAFLSYPTMDATKMGGLEEDTEIMDNLNHKISPKASVSLIRKISKELYVTLGTPANSKGFSVSERYAHQQETSSKVSPELAGSCKFDKPKEDGQSNDRISKMFSPKVLAPQTKGSLKKISIVTNWNAPQNIEEQDIVMKKQVIRRCEHGHKTRTNTILSKFPLQSGKQKTPSETDVDKKTTAHLSLQMLPGIHMDMTEIDPAKGGRKQALLISEQEEGVLEFLPKSLFPPWTFQFQSGDLEEKHQTDANTNINLEQKKLEMDNDSTVNQKEGKLKIGTNRALHLQEEKTEMHKARTANLEKERGRMDTSSSAHPHLLSLKAEESQMKTQVITHRENSRLIMQKQKKELEASNAKQSIQLQKLFQRNVLDSFYSYVPLSPKRKDQKGRLTIRDLKRELSTKYLTMKIQNHPIPQMLNITGRGTPSNRKKLEYDVKLKNIASWSKDVSGIFIRSLSISIMRSPHTDPKTNLEREKRICLPKFQEKSPNTSEMSKRDTLTIVKGEQNFTNTVPQDPQPFAVDKQQMQKLPNVKSEANLRSEMNKKYLKAQTKERIVPEHDVSRIIKKPDLRIIEQEEKILKRILTPTECPSMLEDPKLPKQRDQSEPVWDMTTQKVQQQKAFPGTVPIPPQVKSSEVKIVADSTNAEHLLPICEATKAISESQVKNMIQDKVSSDKLDNIQAYKPDDLKSPPFPEGPDTISTAIYPKTQHKSLLEQFTPKEKNKLTSHLESKALEIQLNLIPEMARKSLQMFNFYPKGTISKDNSWRFYSRHKTMNFMSLEGTDTIEPNSKHKHQKDSPLASNMKTLIVDVSSDSEETITKLQSINKLENGTSAVTSASEMLLPHTLQNHSVKEKGKLLMHFSVKTLEIQMKAFPRIVRESYAMTSAHERKKPLSNCIHPGFTGPKRQNRILLLSEEKSLHQIDLDLQYKYLRFLLGLPVGSTFPKPNVLPKHSKLNTIAVCKNVNAGGQSGSLSIDTELLEQHISFKKQSPHENSSLIRKFPQPTLVCASDRDLHSPRKKDTQVLSESEFHVTPEKNKQYHVWFQERNTCESVDLRTQRNATGSAVSCETQISEDFVDIQTDIESPADLDECSCLEVSESEECVFLEANSYLSQESENILFELQTGIPLENVYKITTDLKSFYSEDSGSHCTRECRKETLIITPPSCKSHKSRKYRSSSKMKSPDWLCHSSSNTAEIQSRSSSVSFSEEKISWTTKSRTSYSSAPLTESNIKSHLAKNQGKSHRHPESQERKKARSDLFRKNSSHWDHDYSCTHSKGKRDRKKRVYDYESERLDCFQSKHKSASKPHHDDINFYSERKQNRPFFFACVPADSLEVIPKTIRWTIPPETLRKRNFRIPLVAKISSSWNIWSSSKKLLGSLSGSLTTVFHS

SEQ ID NO: 95 - protein, 5430 aa, Homo sapiens
MSSSDEETLSERSCRSERSCRSERSYRSERSGSLSPCPPGDTLPWNLPLHEQKKRKSQDSVLDPAERAVVRVADERDRVQKKTFTKWVNKHLMKVRKHINDLYEDLRDGHNLISLLEVLSGIKLPREKGRMRFHRLQNVQIALDFLKQRQVKLVNIRNDDITDGNPKLTLGLIWTIILHFQISDIYISGESGDMSAKEKLLLWTQKVTAGYTGIKCTNFSSCWSDGKMFNALIHRYRPDLVDMERVQIQSNRENLEQAFEVAERLGVTRLLDAEDVDVPSPDEKSVITYVSSIYDAFPKVPEGGEGISATEVDSRWQEYQSRVDSLIPWIKQHTILMSDKTFPQNPVELKALYNQYIHFKETEILAKEREKGRIEELYKLLEVWIEFGRIKLPQGYHPNDVEEEWGKLIIEMLEREKSLRPAVERLELLLQIANKIQNGALNCEEKLTLAKNTLQADAAHLESGQPVQCESDVIMYIQECEGLIRQLQVDLQILRDENYYQLEELAFRVMRLQDELVTLRLECTNLYRKGHFTSLELVPPSTLTTTHLKAEPLTKATHSSSTSWFRKPMTRAELVAISSSEDEGNLRFVYELLSWVEEMQMKLERAEWGNDLPSVELQLETQQHIHTSVEELGSSVKEARLYEGKMSQNFHTSYAETLGKLETQYCKLKETSSFRMRHLQSLHKFVSRATAELIWLNEKEEEELAYDWSDNNSNISAKRNYFSELTMELEEKQDVFRSLQDTAELLSLENHPAKQTVEAYSAAVQSQLQWMKQLCLCVEQHVKENTAYFQFFSDARELESFLRNLQDSIKRKYSCDHNTSLSRLEDLLQDSMDEKEQLIQSKSSVASLVGRSKTIVQLKPRSPDHVLKNTISVKAVCDYRQIEITICKNDECVLEDNSQRTKWKVISPTGNEAMVPSVCFLIPPPNKDAIEMASRVEQSYQKVMALWHQLHVNTKSLISWNYLRKDLDLVQTWNLEKLRSSAPGECHQIMKNLQAHYEDFLQDSRDSVLFSVADRLRLEEEVEACKARFQHLMKSMENEDKEETVAKMYISELKNIRLRLEEYEQRVVKRIQSLASSRTDRDAWQDNALRIAEQEHTQEDLQQLRSDLDAVSMKCDSFLHQSPSSSSVPTLRSELNLLVEKMDHVYGLSTVYLNKLKTVDVIVRSIQDAELLVKGYEIKLSQEEVVLADLSALEAHWSTLRHWLSDVKDKNSVFSVLDEEIAKAKVVAEQMSRLTPERNLDLERYQEKGSQLQERWHRVIAQLEIRQSELESIQEVLGDYRACHGTLIKWIEETTAQQEMMKPGQAEDSRVLSEQLSQQTALFAEIERNQTKLDQCQKFSQQYSTIVKDYELQLMTYKAFVESQQKSPGKRRRMLSSSDAITQEFMDLRTRYTALVTLTTQHVKYISDALRRLEEEEKVVEEEKQEHVEKVKELLGWVSTLARNTQGKATSSETKESTDIEKAILEQQVLSEELTTKKEQVSEAIKTSQIFLAKHGHKLSEKEKKQISEQLNALNKAYHDLCDGSANQLQQLQSQLAHQTEQKTLQKQQNTCHQQLEDLCSWVGQAERALAGHQGRTTQQDLSALQKNQSDLKDLQDDIQNRATSFATVVKDIEGFMEENQTKLSPRELTALREKLHQAKEQYEALQEETRVAQKELEEAVTSALQQETEKSKAAKELAENKKKIDALLDWVTSVGSSGGQLLTNLPGMEQLSGASLEKGALDTTDGYMGVNQAPEKLDKQCEMMKARHQELLSQQQNFILATQSAQAFLDQHGHNLTPEEQQMLQQKLGELKEQYSTSLAQSEAELKQVQTLQDELQKFLQDHKEFESWLERSEKELENMHKGGSSPETLPSLLKRQGSFSEDVISHKGDLRFVTISGQKVLDMENSFKEGKEPSEIGNLVKDKLKDATERYTALHSKCTRLGSHLNMLLGQYHQFQNSADSLQAWMQACEANVEKLLSDTVASDPGVLQEQLATTKQLQEELAEHQVPVEKLQKVARDIMEIEGEPAPDHRHVQETTDSILSHFQSLSYSLAERSSLLQKAIAQSQSVQESLESLLQSIGEVEQNLEGKQVSSLSSGVIQEALATNMKLKQDIARQKSSLEATREMVTRFMETADSTTAAVLQGKLAEVSQRFEQLCLQQQEKESSLKKLLPQAEMFEHLSGKLQQFMENKSRMLASGNQPDQDITHFFQQIQELNLEMEDQQENLDTLEHLVTELSSCGFALDLCQHQDRVQNLRKDFTELQKTVKEREKDASSCQEQLDEFRKLVRTFQKWLKETEGSIPPTETSMSAKELEKQIEHLKSLLDDWASKGTLVEEINCKGTSLENLIMEITAPDSQGKTGSILPSVGSSVGSVNGYHTCKDLTEIQCDMSDVNLKYEKLGGVLHERQESLQAILNRMEEVHKEANSVLQWLESKEEVLKSMDAMSSPTKTETVKAQAESNKAFLAELEQNSPKIQKVKEALAGLLVTYPNSQEAENWKKIQEELNSRWERATEVTVARQRQLEESASHLACFQAAESQLRPWLMEKELMMGVLGPLSIDPNMLNAQKQQVQFMLKEFEARRQQHEQLNEAAQGILTGPGDVSLSTSQVQKELQSINQKWVELTDKLNSRSSQIDQAIVKSTQYQELLQDLSEKVRAVGQRLSVQSAISTQPEAVKQQLEETSEIRSDLEQLDHEVKEAQTLCDELSVLIGEQYLKDELKKRLETVALPLQGLEDLAADRINRLQAALASTQQFQQMFDELRTWLDDKQSQQAKNCPISAKLERLQSQLQENEEFQKSLNQHSGSYEVIVAEGESLLLSVPPGEEKRTLQNQLVELKNHWEELSKKTADRQSRLKDCMQKAQKYQWHVEDLVPWIEDCKAKMSELRVTLDPVQLESSLLRSKAMLNEVEKRRSLLEILNSAADILINSSEADEDGIRDEKAGINQNMDAVTEELQAKTGSLEEMTQRLREFQESFKNIEKKVEGAKHQLEIFDALGSQACSNKNLEKLRAQQEVLQALEPQVDYLRNFTQGLVEDAPDGSDASQLLHQAEVAQQEFLEVKQRVNSGCVMMENKLEGIGQFHCRVREMFSQLADLDDELDGMGAIGRDTDSLQSQIEDVRLFLNKIHVLKLDIEASEAECRHMLEEEGTLDLLGLKRELEALNKQCGKLTERGKARQEQLELTLGRVEDFYRKLKGLNDATTAAEEAEALQWVVGTEVEIINQQLADFKMFQKEQVDPLQMKLQQVNGLGQGLIQSAGKDCDVQGLEHDMEEINARWNTLNKKVAQRIAQLQEALLHCGKFQDALEPLLSWLADTEELIANQKPPSAEYKVVKAQIQEQKLLQRLLDDRKATVDMLQAEGGRIAQSAELADREKITGQLESLESRWTELLSKAAARQKQLEDILVLAKQFHETAEPISDFLSVTEKKLANSEPVGTQTAKIQQQIIRHKALEEDIENHATDVHQAVKIGQSLSSLTSPAEQGVLSEKIDSLQARYSEIQDRCCRKAALLDQALSNARLFGEDEVEVLNWLAEVEDKLSSVFVKDFKQDVLHRQHADHLALNEEIVNRKKNVDQAIKNGQALLKQTTGEEVLLIQEKLDGIKTRYADITVTSSKALRTLEQARQLATKFQSTYEELTGWLREVEEELATSGGQSPTGEQIPQFQQRQKELKKEVMEHRLVLDTVNEVSRALLELVPWRAREGLDKLVSDANEQYKLVSDTIGQRVDEIDAAIQRSQQYEQAADAELAWVAETKRKLMALGPIRLEQDQTTAQLQVQKAFSIDIIRHKDSMDELFSHRSEIFGTCGEEQKTVLQEKTESLIQQYEAISLLNSERYARLERAQVLVNQFWETYEELSPWIEETRALIAQLPSPAIDHEQLRQQQEEMRQLRESIAEHKPHIDKLLKIGPQLKELNPEEGEMVEEKYQKAENMYAQIKEEVRQRALALDEAVSQSTQITEFHDKIEPMLETLENLSSRLRMPPLIPAEVDKIRECISDNKSATVELEKLQPSFEALKRRGEELIGRSQGADKDLAAKEIQDKLDQMVFFWEDIKARAEEREIKFLDVLELAEKFWYDMAALLTTIKDTQDIVHDLESPGIDPSIIKQQVEAAETIKEETDGLHEELEFIRILGADLIFACGETEKPEVRKSIDEMNNAWENLNKTWKERLEKLEDAMQAAVQYQDTLQAMFDWLDNTVIKLCTMPPVGTDLNTVKDQLNEMKEFKVEVYQQQIEMEKLNHQGELMLKKATDETDRDIIREPLTELKHLWENLGEKIAHRQHKLEGALLALGQFQHALEELMSWLTHTEELLDAQRPISGDPKVIEVELAKHHVLKNDVLAHQATVETVNKAGNELLESSAGDDASSLRSRLEAMNQCWESVLQKTEEREQQLQSTLQQAQGFHSEIEDFLLELTRMESQLSASKPTGGLPETAREQLDTHMELYSQLKAKEETYNQLLDKGRLMLLSRDDSGSGSKTEQSVALLEQKWHVVSSKMEERKSKLEEALNLATEFQNSLQEFINWLTLAEQSLNIASPPSLILNTVLSQIEEHKVFANEVNAHRDQIIELDQTGNQLKFLSQKQDVVLIKNLLVSVQSRWEKVVQRSIERGRSLDDARKRAKQFHEAWKKLIDWLEDAESHLDSELEISNDPDKIKLQLSKHKEFQKTLGGKQPVYDTTIRTGRALKEKTLLPEDSQKLDNFLGEVRDKWDTVCGKSVERQHKLEEALLFSGQFMDALQALVDWLYKVEPQLAEDQPVHGDLDLVMNLMDAHKVFQKELGKRTGTVQVLKRSGRELIENSRDDTTWVKGQLQELSTRWDTVCKLSVSKQSRLEQALKQAEVFRDTVHMLLEWLSEAEQTLRFRGALPDDTEALQSLIDTHKEFMKKVEEKRVDVNSAVAMGEVILAVCHPDCITTIKHWITIIRARFEEVLTWAKQHQQRLETALSELVANAELLEELLAWIQWAETTLIQRDQEPIPQNIDRVKALIAEHQTFMEEMTRKQPDVDRVTKTYKRKNIEPTHAPFIEKSRSGGRKSLSQPTPPPMPILSQSEAKNPRINQLSARWQQVWLLALERQRKLNDALDRLEELKEFANFDFDVWRKKYMRWMNHKKSRVMDFFRRIDKDQDGKITRQEFIDGILASKFPTTKLEMTAVADIFDRDGDGYIDYYEFVAALHPNKDAYRPTTDADKIEDEVTRQVAQCKCAKRFQVEQIGENKYRFGDSQQLRLVRILRSTVMVRVGGGWMALDEFLVKNDPCRARGRTNIELREKFILPEGASQGMTPFRSRGRRSKPSSRAASPTRSSSSASQSNHSCTSMPSSPATPASGTKVIPSSGSKLKRPTPTFHSSRTSLAGDTSNSSSPASTGAKTNRADPKKSASRPGSRAGSRAGSRASSRRGSDASDFDLLETQSACSDTSESSAAGGQGNSRRGLNKPSKIPTMSKKTTTASPRTPGPKR

SEQ ID NO: 96 - protein, 5207 aa, Homo sapiens
MECPSCQHVSKEETPKFCSQCGERLPPAAPIADSENNNSTMASASEGEMECGQELKEEGGPCLFPGSDSWQENPEEPCSKASWTVQESKKKKRKKKKKGNKSASSELASLPLSPASPCHLTLLSNPWPQDTALPHSQAQQSGPTGQPSQPPGTATTPLEGDGLSAPTEVGDSPLQAQALGEAGVATGSEAQSSPQFQDHTEGEDQDASIPSGGRGLSQEGTGPPTSAGEGHSRTEDAAQELLLPESKGGSSEPGTELQTTEQQAGASASMAVDAVAEPANAVKGAGKEMKEKTQRMKQPPATTPPFKTHCQEAETKTKDEMAAAEEKVGKNEQGEPEDLKKPEGKNRSAAAVKNEKEQKNQEADVQEVKASTLSPGGGVTVFFHAIISLHFPFNPDLHKVFIRGGEEFGESKWDSNICELHYTRDLGHDRVLVEGIVCISKKHLDKYIPYKYVIYNGESFEYEFIYKHQQKKGEYVNRCLFIKSSLLGSGDWHQYYDIVYMKPHGRLQKVMNHITDGPRKDLVKGKQIAAALMLDSTFSILQTWDTINLNSFFTQFEQFCFVLQQPMIYEGQAQLWTDLQYREKEVKRYLWQHLKKHVVPLPDGKSTDFLPVDCPVRSKLKTGLIVLFVVEKIELLLEGSLDWLCHLLTSDASSPDEFHRDLSHILGIPQSWRLYLVNLCQRCMDTRTYTWLGALPVLHCCMELAPRHKDAWRQPEDTWAALEGLSFSPFREQMLDTSSLLQFMREKQHLLSIDEPLFRSWFSLLPLSHLVMYMENFIEHLGRFPAHILDCLSGIYYRLPGLEQVLNTQDVQDVQNVQNILEMLLRLLDTYRDKIPEEALSPSYLTVCLKLHEAICSSTKLLKFYELPALSAEIVCRMIRLLSLVDSAGQRDETGNNSVQTVFQGTLAATKRWLREVFTKNMLTSSGASFTYVKEIEVWRRLVEIQFPAEHGWKESLLGDMEWRLTKEEPLSQITAYCNSCWDTKGLEDSVAKTFEKCIIEAVSSACQSQTSILQGFSYSDLRKFGIVLSAVITKSWPRTADNFNDILKHLLTLADVKHVFRLCGTDEKILANVTEDAKRLIAVADSVLTKVVGDLLSGTILVGQLELIIKHKNQFLDIWQLREKSLSPQDEQCAVEEALDWRREELLLLKKEKRCVDSLLKMCGNVKHLIQVDFGVLAVRHSQDLSSKRLNDTVTVRLSTSSNSQRATHYHLSSQVQEMAGKIDLLRDSHIFQLFWREAAEPLSEPKEDQEAAELLSEPEEESERHILELEEVYDYLYQPSYRKFIKLHQDLKSGEVTLAEIDVIFKDFVNKYTDLDSELKIMCTVDHQDQRDWIKDRVEQIKEYHHLHQAVHAAKVILQVKESLGLNGDFSVLNTLLNFTDNFDDFRRETLDQINQELIQAKKLLQDISEARCKGLQALSLRKEFICWVREALGGINELKVFVDLASISAGENDIDVDRVACFHDAVQGYASLLFKLDPSVDFSAFMKHLKKLWKALDKDQYLPRKLCDSARNLEWLKTVNESHGSVERSSLTLATAINQRGIYVIQAPKGGQKISPDTVLHLILPESPGSHEESREYSLEEVKELLNKLMLMSGKKDRNNTEVERFSEVFCSVQRLSQAFIDLHSAGNMLFRTWIAMAYCSPKQGVSLQMDFGLDLVTELKEGGDVTELLAALCRQMEHFLDSWKRFVTQKRMEHFYLNFYTAEQLVYLSTELRKQPPSDAALTMLSFIKSNCTLRDVLRASVGCGSEAARYRMRRVMEELPLMLLSEFSLVDKLRIIMEQSMRCLPAFLPDCLDLETLGHCLAHLAGMGGSPVERCLPRGLQVGQPNLVVCGHSEVLPAALAVYMQTPSQPLPTYDEVLLCTPATTFEEVALLLRRCLTLGSLGHKVYSLLFADQLSYEVARQAEELFHNLCTQQHREDYQLVMVCDGDWEHCYLPSAFSQHKVFVTPQAPLEAIQAYLAGHYRVPKQTLSAAAVFNDRLCVGIVASERAGVGKSLYVKRLHDKMKMQLNVKNVPLKTIRLIDPQVDESRVLGALLPFLDAQYQKVPVLFHLDVTSSVQTGIWVFLFKLLILQYLMDINGKMWLRNPCHLYIVEILERRTSVPSRSSSALRTRVPQFSFLDIFPKVTCRPPKEVIDMELSALRSDTEPGMDLWEFCSETFQRPYQYLRRFNQNQDLDTFQYQEGSVEGTPEECLQHFLFHCGVINPSWSELRNFARFLNYQLRDCEASLFCNPSFIGDTLRGFKKFVVTFMIFMARDFATPSLHTSDQSPGKHMVTMDGVREEDLAPFSLRKRWESEPHPYVFFNDDHTTMTFIGFHLQPNINGSVDAISHLTGKVIKRDVMTRDLYQGLLLQRVPFNVDFDKLPRHKKLERLCLTLGIPQATDPDKTYELTTDNMLKILAIEMRFRCGIPVIIMGETGCGKTRLIKFLSDLRRGGTNADTIKLVKVHGGTTADMIYSRVREAENVAFANKDQHQLDTILFFDEANTTEAISCIKEVLCDHMVDGQPLAEDSGLHIIAACNPYRKHSEEMICRLESAGLGYRVSMEETADRLGSIPLRQLVYRVHALPPSLIPLVWDFGQLSDVAEKLYIQQIVQRLVESISLDENGTRVITEVLCASQGFMRKTEDECSFVSLRDVERCVKVFRWFHEHSAMLLAQLNAFLSKSSVSKNHTERDPVLWSLMLAIGVCYHASLEKKDSYRKAIARFFPKPYDDSRLLLDEITRAQDLFLDGVPLRKTIAKNLALKENVFMMVVCIELKIPLFLVGKPGSSKSLAKTIVADAMQGPAAYSDLFRSLKQVHLVSFQCSPHSTPQGIISTFRQCARFQQGKDLQQYVSVVVLDEVGLAEDSPKMPLKTLHPLLEDGCIEDDPAPHKKVGFVGISNWALDPAKMNRGIFVSRGSPNETELIESAKGICSSDILVQDRVQGYFASFAKAYETVCKRQDKEFFGLRDYYSLIKMVFAAAKASNRKPSPQDIAQAVLRNFSGKDDIQALDIFLANLPEAKCSEEVSPMQLIKQNIFGPSQKVPGGEQEDAESRYLLVLTKNYVALQILQQTFFEGDQQPEIIFGSGFPKDQEYTQLCRNINRVKICMETGKMVLLLNLQNLYESLYDALNQYYVHLGGQKYVDLGLGTHRVKCRVHPNFRLIVIEEKDVVYKHFPIPLINRLEKHYLDINTVLEKWQKSIVEELCAWVEKFINVKAHHFQKRHKYSPSDVFIGYHSDACASVVLQVIERQGPRALTEELHQKVSEEAKSILLNCATPDAVVRLSAYSLGGFAAEWLSQEYFHRQRHNSFADFLQAHLHTADLERHAIFTEITTFSRLLTSHDCEILESEVTGRAPKPTLLWLQQFDTEYSFLKEVRNCLTNTAKCKILIFQTDFEDGIRSAQLIASAKYSVINEINKIRENEDRIFVYFITKLSRVGRGTAYVGFHGGLWQSVHIDDLRRSTLMVSDVTRLQHVTISQLFAPGDLPELGLEHRAEDGHEEAMETEASTSGEVAEVAEEAMETESSEKVGKETSELGGSDVSILDTTRLLRSCVQSAVGMLRDQNESCTRNMRRVVLLLGLLNEDDACHASFLRVSKMRLSVFLKKQEESQFHPLEWLAREACNQDALQEAGTFRHTLWKRVQGAVTPLLASMISFIDRDGNLELLTRPDTPPWARDLWMFIFSDTMLLNIPLVMNNERHKGEMAYIVVQNHMNLSENASNNVPFSWKIKDYLEELWVQAQYITDAEGLPKKFVDIFQQTPLGRFLAQLHGEPQQELLQCYLKDFILLTMRVSTEEELKFLQMALWSCTRKLKAASEAPEEEVSLPWVHLAYQRFRSRLQNFSRILTIYPQVLHSLMEARWNHELAGCEMTLDAFAAMACTEMLTRNTLKPSPQAWLQLVKNLSMPLELICSDEHMQGSGSLAQAVIREVRAQWSRIFSTALFVEHVLLGTESRVPELQGLVTEHVFLLDKCLRENSDVKTHGPFEAVMRTLCECKETASKTLSRFGIQPCSICLGDAKDPVCLPCDHVHCLRCLRAWFASEQMICPYCLTALPDEFSPAVSQAHREAIEKHARFRQMCNSFFVDLVSTICFKDNAPPEKEVIESLLSLLFVQKGRLRDAAQRHCEHTKSLSPFNDVVDKTPVIRSVILKLLLKYSFHDVKDYIQEYLTLLKKKAFITEDKTELYMLFINCLEDSILEKTSAYSRNDELNHLEEEGRFLKAYSPASRGREPANEASVEYLQEVARIRLCLDRAADFLSEPEGGPEMAKEKQCYLQQVKQFCIRVENDWHRVYLVRKLSSQRGMEFVQGLSKPGRPHQWVFPKDVVKQQGLRQDHPGQMDRYLVYGDEYKALRDAVAKAVLECKPLGIKTALKACKTPQSQQSAYFLLTLFREVAILYRSHNASLHPTPEQCEAVSKFIGECKILSPPDISRFATSLVDNSVPLLRAGPSDSNLDGTVTEMAIHAAAVLLCGQNELLEPLKNLAFSPATMAHAFLPTMPEDLLAQARRWKGLERVHWYTCPNGHPCSVGECGRPMEQSICIDCHAPIGGIDHKPRDGFHLVKDKADRTQTGHVLGNPQRRDVVTCDRGLPPVVFLLIRLLTHLALLLGASQSSQALINIIKPPVRDPKGFLQQHILKDLEQLAKMLGHSADETIGVVHLVLRRLLQEQHQLSSRRLLNFDTELSTKEMRNNWEKEIAAVISPELEHLDKTLPTMNNLISQDKRISSNPVAKIIYGDPVTFLPHLPRKSVVHCSKIWSCRKRITVEYLQHIVEQKNGKERVPILWHFLQKEAELRLVKFLPEILALQRDLVKQFQNVQQVEYSSIRGFLSKHSSDGLRQLLHNRITVFLSTWNKLRRSLETNGEINLPKDYCSTDLDLDTEFEILLPRRRGLGLCATALVSYLIRLHNEIVYAVEKLSKENNSYSVDAAEVTELHVISYEVERDLTPLILSNCQYQVEEGRETVQEFDLEKIQRQIVSRFLQGKPRLSLKGIPTLVYRHDWNYEHLFMDIKNKMAQDSLPSSVISAISGQLQSYSDACEVLSVVEVTLGFLSTAGGDPNMQLNVYTQDILQMGDQTIHVLKALNRCQLKHTIALWQFLSAHKSEQLLRLHKEPFGEISSRYKADLSPENAKLLSTFLNQTGLDAFLLELHEMIILKLKNPQTQTEERFRPQWSLRDTLVSYMQTKESEILPEMASQFPEEILLASCVSVWKTAAVLKWNREMR

SEQ ID NO: 97 - protein, 4678 aa, Homo sapiens
MMMCAATASPAAASSGLGGDGFYPAATFSSSPAPGALFMPVPDGSVAAAGLGLGLPAADSRGHYQLLLSGRALADRYRRIYTAALNDRDQGGGSAGHPASRNKKILNKKKLKRKQKSKSKVKTRSKSENLENTVIIPDIKLHSNPSAFNIYCNVRHCVLEWQKKEISLAAASKNSVQSGESDSDEEEESKEPPIKLPKIIEVGLCEVFELIKETRFSHPSLCLRSLQALLNVLQGQQPEGLQSEPPEVLESLFQLLLEITVRSTGMNDSTGQSLTALSCACLFSLVASWGETGRTLQAISAILTNNGSHACQTIQVPTILNSLQRSVQAVLVGKIQIQDWFSNGIKKAALMHKWPLKEISVDEDDQCLLQNDGFFLYLLCKDGLYKIGSGYSGTVRGHIYNSTSRIRNRKEKKSWLGYAQGYLLYRDVNNHSMTAIRISPETLEQDGTVMLPDCHTEGQNILFTDGEYINQIAASRDDGFVVRIFATSTEPVLQQELQLKLARKCLHACGISLFDLEKDLHIISTGFDEESAILGAGREFALMKTANGKIYYTGKYQSLGIKQGGPSAGKWVELPITKSPKIVHFSVGHDGSHALLVAEDGSIFFTGSASKGEDGESTKSRRQSKPYKPKKIIKMEGKIVVYTACNNGSSSVISKDGELYMFGKDAIYSDSSSLVTDLKGHFVTQVAMGKAHTCVLMKNGEVWTFGVNNKGQCGRDTGAMNQGGKGFGVENMATAMDEDLEEELDEKDEKSMMCPPGMHKWKLEQCMVCTVCGDCTGYGASCVSSGRPDRVPGGICGCGSGESGCAVCGCCKACARELDGQEARQRGILDAVKEMIPLDLLLAVPVPGVNIEEHLQLRQEEKRQRVIRRHRLEEGRGPLVFAGPIFMNHREQALARLRSHPAQLKHKRDKHKDGSGERGEKDASKITTYPPGSVRFDCELRAVQVSCGFHHSVVLMENGDVYTFGYGQHGQLGHGDVNSRGCPTLVQALPGPSTQVTAGSNHTAVLLMDGQVFTFGSFSKGQLGRPILDVPYWNAKPAPMPNIGSKYGRKATWIGASGDQTFLRIDEALINSHVLATSEIFASKHIIGLVPASISEPPPFKCLLINKVDGSCKTFNDSEQEDLQGFGVCLDPVYDVIWRFRPNTRELWCYNAVVADARLPSAADMQSRCSILSPELALPTGSRALTTRSHAALHILGCLDTLAAMQDLKMGVASTEEETQAVMKVYSKEDYSVVNRFESHGGGWGYSAHSVEAIRFSADTDILLGGLGLFGGRGEYTAKIKLFELGPDGGDHETDGDLLAETDVLAYDCAAREKYAMMFDEPVLLQAGWWYVAWARVSGPSSDCGSHGQASITTDDGVVFQFKSSKKSNNGTDVNAGQIPQLLYRLPTSDGSASKGKQQTSEPVHILKRSFARTVSVECFESLLSILHWSWTTLVLGVEELRGLKGFQFTATLLDLERLRFVGTCCLRLLRVYTCEIYPVSATGKAVVEETSKLAECIGKTRTLLRKILSEGVDHCMVKLDNDPQGYLSQPLSLLEAVLQECHNTFTACFHSFYPTPALQWACLCDLLNCLDQDIQEANFKTSSSRLLAAVMSALCHTSVKLTSIFPIAYDGEVLLRSIVKQVSTENDSTLVHRFPLLVAHMEKLSQSEENISGMTSFREVLEKMLVIVVLPVRNSLRRENELFSSHLVSNTCGLLASIVSELTASALGSEVDGLNSLHSVKASANRFTKTSQGRSWNTGNGSPDAICFSVDKPGIVVVGFSVYGGGGIHEYELEVLVDDSEHAGDSTHSHRWTSLELVKGTYTTDDSPSDIAEIRLDKVVPLKENVKYAVRLRNYGSRTANGDGGMTTVQCPDGVTFTFSTCSLSSNGTNQTRGQIPQILYYRSEFDGDLQSQLLSKANEEDKNCSRALSVVSTVVRASKDLLHRALAVDADDIPELLSSSSLFSMLLPLIIAYIGPVAAAIPKVAVEVFGLVQQLLPSVAILNQKYAPPAFNPNQSTDSTTGNQPEQGLSACTTSSHYAVIESEHPYKPACVMHYKVTFPECVRWMTIEFDPQCGTAQSEDVLRLLIPVRTVQNSGYGPKLTSVHENLNSWIELKKFSGSSGWPTMVLVLPGNEALFSLETASDYVKDDKASFYGFKCFAIGYEFSPGPDEGVIQLEKELANLGGVCAAALMKKDLALPIGNELEEDLEILEEAALQVCKTHSGILGKGLALSHSPTILEALEGNLPLQIQSNEQSFLDDFIACVPGSSGGRLARWLQPDSYADPQKTSLILNKDDIRCGWPTTITVQTKDQYGDVVHVPNMKVEVKAVPVSQKKMSLQQDQAKKPQRIPGSPAVTAASSNTDMTYGGLASPKLDVSYEPMIVKEARYIAITMMKVYENYSFEELRFASPTPKRPSENMLIRVNNDGTYCANWTPGAIGLYTLHVTIDGIEIDAGLEVKVKDPPKGMIPPGTQLVKPKSEPQPNKVRKFVAKDSAGLRIRSHPSLQSEQIGIVKVNGTITFIDEIHNDDGVWLRLNDETIKKYVPNMNGYTEAWCLSFNQHLGKSLLVPVDESKTNTDDFFKDINSCCPQEATMQEQDMPFLRGGPGMYKVVKTGPSGHNIRSCPNLRGIPIGMLVLGNKVKAVGEVTNSEGTWVQLDQNSMVEFCESDEGEAWSLARDRGGNQYLRHEDEQALLDQNSQTPPPSPFSVQAFNKGASCSAQGFDYGLGNSKGDRGNISTSSKPASTSGKSELSSKHSRSLKPDGRMSRTTADQKKPRGTESLSASESLILKSDAAKLRSDSHSRSLSPNHNTLQTLKSDGRMPSSSRAESPGPGSRLSSPKPKTLPANRSSPSGASSPRSSSPHDKNLPQKSTAPVKTKLDPPRERSKSDSYTLDPDTLRKKKMPLTEPLRGRSTSPKPKSVPKDSTDSPGSENRAPSPHVVQENLHSEVVEVCTSSTLKTNSLTDSTCDDSSEFKSVDEGSNKVHFSIGKAPLKDEQEMRASPKISRKCANRHTRPKKEKSSFLFKGDGSKPLEPAKQAMSPSVAECARAVFASFLWHEGIVHDAMACSSFLKFHPELSKEHAPIRSSLNSQQPTEEKETKLKNRHSLEISSALNMFNIAPHGPDISKMGSINKNKVLSMLKEPPLHEKCEDGKTETTFEMSMHNTMKSKSPLPLTLQHLVAFWEDISLATIKAASQNMIFPSPGSCAVLKKKECEKENKKSKKEKKKKEKAEVRPRGNLFGEMAQLAVGGPEKDTICELCGESHPYPVTYHMRQAHPGCGRYAGGQGYNSIGHFCGGWAGNCGDGGIGGSTWYLVCDRCREKYLREKQAAAREKVKQSRRKPMQVKTPRALPTMEAHQVIKANALFLLSLSSAAEPSILCYHPAKPFQSQLPSVKEGISEDLPVKMPCLYLQTLARHHHENFVGYQDDNLFQDEMRYLRSTSVPAPYISVTPDASPNVFEEPESNMKSMPPSLETSPITDTDLAKRTVFQRSYSVVASEYDKQHSILPARVKAIPRRRVNSGDTEVGSSLLRHPSPELSRLISAHSSLSKGERNFQWPVLAFVIQHHDLEGLEIAMKQALRKSACRVFAMEAFNWLLCNVIQTTSLHDILWHFVASLTPAPVEPEEEEDEENKTSKENSEQEKDTRVCEHPLSDIVIAGEAAHPLPHTFHRLLQTISDLMMSLPSGSSLQQMALRCWSLKFKQSDHQFLHQSNVFHHINNILSKSDDGDSEESFSISIQSGFEAMSQELCIVMCLKDLTSIVDIKTSSRPAMIGSLTDGSTETFWESGDEDKNKTKNITINCVKGINARYVSVHVDNSRDLGNKVTSMTFLTGKAVEDLCRIKQVDLDSRHIGWVTSELPGGDNHIIKIELKGPENTLRVRQVKVLGWKDGESTKIAGQISASVAQQRNCEAETLRVFRLITSQVFGKLISGDAEPTPEQEEKALLSSPEGEEKVYNATSDADLKEHMVGIIFSRSKLTNLQKQVCAHIVQAIRMEATRVREEWEHAISSKENANSQPNDEDASSDAYCFELLSMVLALSGSNVGRQYLAQQLTLLQDLFSLLHTASPRVQRQVTSLLRRVLPEVTPSRLASIIGVKSLPPADISDIIHSTEKGDWNKLGILDMFLGCIAKALTVQLKAKGTTITGTAGTTVGKGVTTVTLPMIFNSSYLRRGESHWWMKGSTPTQISEIIIKLIKDMAAGHLSEAWSRVTKNAIAETIIALTKMEEEFRSPVRCIATTRLWLALASLCVLDQDHVDRLSSGRWMGKDGQQKQMPMCDNHDDGETAAIILCNVCGNLCTDCDRFLHLHRRTKTHQRQVFKEEEEAIKVDLHEGCGRTKLFWLMALADSKTMKAMVEFREHTGKPTTSSSEACRFCGSRSGTELSAVGSVCSDADCQEYAKIACSKTHPCGHPCGGVKNEEHCLPCLHGCDKSATSLKQDADDMCMICFTEALSAAPAIQLDCSHIFHLQCCRRVLENRWLGPRITFGFISCPICKNKINHIVLKDLLDPIKELYEDVRRKALMRLEYEGLHKSEAITTPGVRFYNDPAGYAMNRYAYYVCYKCRKAYFGGEARCDAEAGRGDDYDPRELICGACSDVSRAQMCPKHGTDFLEYKCRYCCSVAVFFCFGTTHFCNACHDDFQRMTSIPKEELPHCPAGPKGKQLEGTECPLHVVHPPTGEEFALGCGVCRNAHTF

SEQ ID NO: 98 - protein, 379 aa, Homo sapiens
MEQLSSANTRFALDLFLALSENNPAGNIFISPFSISSAMAMVFLGTRGNTAAQLSKTFHFNTVEEVHSRFQSLNADINKRGASYILKLANRLYGEKTYNFLPEFLVSTQKTYGADLASVDFQHASEDARKTINQWVKGQTEGKIPELLASGMVDNMTKLVLVNAIYFKGNWKDKFMKEATTNAPFRLNKKDRKTVKMMYQKKKFAYGYIEDLKCRVLELPYQGEELSMVILLPDDIEDESTGLKKIEEQLTLEKLHEWTKPENLDFIEVNVSLPRFKLEESYTLNSDLARLGVQDLFNSSKADLSGMSGARDIFISKIVHKSFVEVNEEGTEAAAATAGIATFCMLMPEENFTADHPFLFFIRHNSSGSILFLGRFSSP

SEQ ID NO: 99 - protein, 262 aa, Homo sapiens
MWFLVLCLALSLGGTGAAPPIQSRIVGGWECEQHSQPWQAALYHFSTFQCGGILVHRQWVLTAAHCISDNYQLWLGRHNLFDDENTAQFVHVSESFPHPGFNMSLLENHTRQADEDYSHDLMLLRLTEPADTITDAVKVVELPTEEPEVGSTCLASGWGSIEPENFSFPDDLQCVDLKILPNDECKKAHVQKVTDFMLCVGHLEGGKDTCVGDSGGPLMCDGVLQGVTSWGYVPCGTPNKPSVAVRVLSYVKWIEDTIAENS

SEQ ID NO: 100 - protein, 4624 aa, Homo sapiens
MFRIGRRQLWKHSVTRVLTQRLKGEKEAKRALLDARHNYLFAIVASCLDLNKTEVEDAILEGNQIERIDQLFAVGGLRHLMFYYQDVEEAETGQLGSLGGVNLVSGKIKKPKVFVTEGNDVALTGVCVFFIRTDPSKAITPDNIHQEVSFNMLDAADGGLLNSVRRLLSDIFIPALRATSHGWGELEGLQDAANIRQEFLSSLEGFVNVLSGAQESLKEKVNLRKCDILELKTLKEPTDYLTLANNPETLGKIEDCMKVWIKQTEQVLAENNQLLKEADDVGPRAELEHWKKRLSKFNYLLEQLKSPDVKAVLAVLAAAKSKLLKTWREMDIRITDATNEAKDNVKYLYTLEKCCDPLYSSDPLSMMDAIPTLINAIKMIYSISHYYNTSEKITSLFVKVTNQIISACKAYITNNGTASIWNQPQDVVEEKILSAIKLKQEYQLCFHKTKQKLKQNPNAKQFDFSEMYIFGKFETFHRRLAKIIDIFTTLKTYSVLQDSTIEGLEDMATKYQGIVATIKKKEYNFLDQRKMDFDQDYEEFCKQTNDLHNELRKFMDVTFAKIQNTNQALRMLKKFERLNIPNLGIDDKYQLILENYGADIDMISKLYTKQKYDPPLARNQPPIAGKILWARQLFHRIQQPMQLFQQHPAVLSTAEAKPIIRSYNRMAKVLLEFEVLFHRAWLRQIEEIHVGLEASLLVKAPGTGELFVNFDPQILILFRETECMAQMGLEVSPLATSLFQKRDRYKRNFSNMKMMLAEYQRVKSKIPAAIEQLIVPHLAKVDEALQPGLAALTWTSLNIEAYLENTFAKIKDLELLLDRVNDLIEFRIDAILEEMSSTPLCQLPQEEPLTCEEFLQMTKDLCVNGAQILHFKSSLVEEAVNELVNMLLDVEVLSEEESEKISNENSVNYKNESSAKREEGNFDTLTSSINARANALLLTTVTRKKKETEMLGEEARELLSHFNHQNMDALLKVTRNTLEAIRKRIHSSHTINFRDSNSASNMKQNSLPIFRASVTLAIPNIVMAPALEDVQQTLNKAVECIISVPKGVRQWSSELLSKKKIQERKMAALQSNEDSDSDVEMGENELQDTLEIASVNLPIPVQTKNYYKNVSENKEIVKLVSVLSTIINSTKKEVITSMDCFKRYNHIWQKGKEEAIKTFITQSPLLSEFESQILYFQNLEQEINAEPEYVCVGSIALYTADLKFALTAETKAWMVVIGRHCNKKYRSEMENIFMLIEEFNKKLNRPIKDLDDIRIAMAALKEIREEQISIDFQVGPIEESYALLNRYGLLIAREEIDKVDTLHYAWEKLLARAGEVQNKLVSLQPSFKKELISAVEVFLQDCHQFYLDYDLNGPMASGLKPQEASDRLIMFQNQFDNIYRKYITYTGGEELFGLPATQYPQLLEIKKQLNLLQKIYTLYNSVIETVNSYYDILWSEVNIEKINNELLEFQNRCRKLPRALKDWQAFLDLKKIIDDFSECCPLLEYMASKAMMERHWERITTLTGHSLDVGNESFKLRNIMEAPLLKYKEEIEDICISAVKERDIEQKLKQVINEWDNKTFTFGSFKTRGELLLRGDSTSEIIANMEDSLMLLGSLLSNRYNMPFKAQIQKWVQYLSNSTDIIESWMTVQNLWIYLEAVFVGGDIAKQLPKEAKRFSNIDKSWVKIMTRAHEVPSVVQCCVGDETLGQLLPHLLDQLEICQKSLTGYLEKKRLCFPRFFFVSDPALLEILGQASDSHTIQAHLLNVFDNIKSVKFHEKIYDRILSISSQEGETIELDKPVMAEGNVEVWLNSLLEESQSSLHLVIRQAAANIQETGFQLTEFLSSFPAQVGLLGIQMIWTRDSEEALRNAKFDKKIMQKTNQAFLELLNTLIDVTTRDLSSTERVKYETLITIHVHQRDIFDDLCHMHIKSPMDFEWLKQCRFYFNEDSDKMMIHITDVAFIYQNEFLGCTDRLVITPLTDRCYITLAQALGMSMGGAPAGPAGTGKTETTKDMGRCLGKYVVVFNCSDQMDFRGLGRIFKGLAQSGSWGCFDEFNRIDLPVLSVAAQQISIILTCKKEHKKSFIFTDGDNVTMNPEFGLFLTMNPGYAGRQELPENLKINFRSVAMMVPDRQIIIRVKLASCGFIDNVVLARKFFTLYKLCEEQLSKQVHYDFGLRNILSVLRTLGAAKRANPMDTESTIVMRVLRDMNLSKLIDEDEPLFLSLIEDLFPNILLDKAGYPELEAAISRQVEEAGLINHPPWKLKVIQLFETQRVRHGMMTLGPSGAGKTTCIHTLMRAMTDCGKPHREMRMNPKAITAPQMFGRLDVATNDWTDGIFSTLWRKTLRAKKGEHIWIILDGPVDAIWIENLNSVLDDNKTLTLANGDRIPMAPNCKIIFEPHNIDNASPATVSRNGMVFMSSSILDWSPILEGFLKKRSPQEAEILRQLYTESFPDLYRFCIQNLEYKMEVLEAFVITQSINMLQGLIPLKEQGGEVSQAHLGRLFVFALLWSAGAALELDGRRRLELWLRSRPTGTLELPPPAGPGDTAFDYYVAPDGTWTHWNTRTQEYLYPSDTTPEYGSILVPNVDNVRTDFLIQTIAKQGKAVLLIGEQGTAKTVIIKGFMSKYDPECHMIKSLNFSSATTPLMFQRTIESYVDKRMGTTYGPPAGKKMTVFIDDVNMPIINEWGDQVTNEIVRQLMEQNGFYNLEKPGEFTSIVDIQFLAAMIHPGGGRNDIPQRLKRQFSIFNCTLPSEASVDKIFGVIGVGHYCTQRGFSEEVRDSVTKLVPLTRRLWQMTKIKMLPTPAKFHYVFNLRDLSRVWQGMLNTTSEVIKEPNDLLKLWKHECKRVIADRFTVSSDVTWFDKALVSLVEEEFGEEKKLLVDCGIDTYFVDFLRDAPEAAGETSEEADAETPKIYEPIESFSHLKERLNMFLQLYNESIRGAGMDMVFFADAMVHLVKISRVIRTPQGNALLVGVGGSGKQSLTRLASFIAGYVSFQITLTRSYNTSNLMEDLKVLYRTAGQQGKGITFIFTDNEIKDESFLEYMNNVLSSGEVSNLFARDEIDEINSDLASVMKKEFPRCLPTNENLHDYFMSRVRQNLHIVLCFSPVGEKFRNRALKFPALISGCTIDWFSRWPKDALVAVSEHFLTSYDIDCSLEIKKEVVQCMGSFQDGVAEKCVDYFQRFRRSTHVTPKSYLSFIQGYKFIYGEKHVEVRTLANRMNTGLEKLKEASESVAALSKELEAKEKELQVANDKADMVLKEVTMKAQAAEKVKAEVQKVKDRAQAIVDSISKDKAIAEEKLEAAKPALEEAEAALQTIRPSDIATVRTLGRPPHLIMRIMDCVLLLFQRKVSAVKIDLEKSCTMPSWQESLKLMTAGNFLQNLQQFPKDTINEEVIEFLSPYFEMPDYNIETAKRVCGNVAGLCSWTKAMASFFSINKEVLPLKANLVVQENRHLLAMQDLQKAQAELDDKQAELDVVQAEYEQAMTEKQTLLEDAERCRHKMQTASTLISGLAGEKERWTEQSQEFAAQTKRLVGDVLLATAFLSYSGPFNQEFRDLLLNDWRKEMKARKIPFGKNLNLSEMLIDAPTISEWNLQGLPNDDLSIQNGIIVTKASRYPLLIDPQTQGKIWIKNKESRNELQITSLNHKYFRNHLEDSLSLGRPLLIEDVGEELDPALDNVLERNFIKTGSTFKVKVGDKEVDVLDGFRLYITTKLPNPAYTPEISARTSIIDFTVTMKGLEDQLLGRVILTEKQELEKERTHLMEDVTANKRRMKELEDNLLYRLTSTQGSLVEDESLIVVLSNTKRTAEEVTQKLEISAETEVQINSAREEYRPVATRGSILYFLITEMRLVNEMYQTSLRQFLGLFDLSLARSVKSPITSKRIANIIEHMTYEVYKYAARGLYEEHKFLFTLLLTLKIDIQRNRVKHEEFLTLIKGGASLDLKACPPKPSKWILDITWLNLVELSKLRQFSDVLDQISRNEKMWKIWFDKENPEEEPLPNAYDKSLDCFRRLLLIRSWCPDRTIAQARKYIVDSMGEKYAEGVILDLEKTWEESDPRTPLICLLSMGSDPTDSIIALGKRLKIETRYVSMGQGQEVHARKLLQQTMANGGWALLQNCHLGLDFMDELMDIIIETELVHDAFRLWMTTEAHKQFPITLLQMSIKFANDPPQGLRAGLKRTYSGVSQDLLDVSSGSQWKPMLYAVAFLHSTVQERRKFGALGWNIPYEFNQADFNATVQFIQNHLDDMDVKKGVSWTTIRYMIGEIQYGGRVTDDYDKRLLNTFAKVWFSENMFGPDFSFYQGYNIPKCSTVDNYLQYIQSLPAYDSPEVFGLHPNADITYQSKLAKDVLDTILGIQPKDTSGGGDETREAVVARLADDMLEKLPPDYVPFEVKERLQKMGPFQPMNIFLRQEIDRMQRVLSLVRSTLTELKLAIDGTIIMSENLRDALDCMFDARIPAWWKKASWISSTLGFWFTELIERNSQFTSWVFNGRPHCFWMTGFFNPQGFLTAMRQEITRANKGWALDNMVLCNEVTKWMKDDISAPPTEGVYVYGLYLEGAGWDKRNMKLIESKPKVLFELMPVIRIYAENNTLRDPRFYSCPIYKKPVRTDLNYIAAVDLRTAQTPEHWVLRGVALLCDVK

SEQ ID NO: 101 - protein, 6907 aa, Homo sapiens
MASSPELPTEDEQGSWGIDDLHISLQAEQEDTQKKAFTCWINSQLARHTSPSVISDLFTDIKKGHVLLDLLEVLSGQQLPRDKGSNTFQCRINIEHALTFLRNRSIKLINIHVTDIIDGNPSIILGLIWTIILHFHIEKLAQTLSCNYNQPSLDDVSVVDSSPASSPPAKKCSKVQARWQMSARKALLLWAQEQCATYESVNVTDFKSSWRNGMAFLAIIHALRPDLIDMKSVKHRSNKDNLREAFRIAEQELKIPRLLEPEDVDVVDPDEKSIMTYVAQFLQYSKDAPGTGEEAQGKVKDAMGWLTLQKEKLQKLLKDSENDTYFKKYNSLLSFMESFNEEKKSFLDVLSIKRDLDELDKDHLQLREAWDGLDHQINAWKIKLNYALPPPLHQTEAWLQEVEELMDEDLSASQDHSQAVTLIQEKMTLFKSLMDRFEHHSNILLTFENKDENHLPLVPPNKLEEMKRRINNILEKKFILLLEFHYYKCLVLGLVDEVKSKLDIWNIKYGSRESVELLLEDWHKFIEEKEFLARLDTSFQKCGEIYKNLAGECQNINKQYMMVKSDVCMYRKNIYNVKSTLQKVLACWATYVENLRLLRACFEETKKEEIKEVPFETLAQWNLEHATLNEAGNFLVEVSNDVVGSSISKELRRLNKRWRKLVSKTQLEMNLPLMIKKQDQPTFDNSGNILSKEEKATVEFSTDMSVELPENYNQNIKAGEKHEKENEEFTGQLKVAKDVEKLIGQVEIWEAEAKSVLDQDDVDTSMEESLKHLIAKGSMFDELMARSEDMLQMDIQNISSQESFQHVLTTGLQAKIQEAKEKVQINVVKLIAALKNLTDVSPDLDIRLKMEESQKELESYMMRAQQLLGQRESPGELISKHKEALIISNTKSLAKYLKAVEELKNNVTEDIKMSLEEKSRDVCAKWESLHHELSLYVQQLKIDIEKGKLSDNILKLEKQINKEKKLIRRGRTKGLIKEHEACFSEEGCLYQLNHHMEVLRELCEELPSQKSQQEVKRLLKDYEQKIERLLKCASEIHMTLQPTAGGTSKNEGTITTSENRGGDPHSEAPFAKSDNQPSTEKAMEPTMKFSLASVLRPLQEESIMEKDYSASINSLLERYDTYRDILEHHLQNNKFRITSDFSSEEDRSSSCLQAKLTDLQVIKNETDARWKEFEIISLKLENHVNDIKKPFVIKERDTLKERERELQMTLNTRMESLETALRLVLPVEKASLLLCGSDLPLHKMAIQGFHLIDADRIYQHLRNIQDSIAKQIEICNRLEEPGNFVLKELHPFDLHAMQNIILKYKTQFEGMNHRVQRSEDTLKALEDFLASLRTAKLSAEPVTDLSASDTQVAQENTLTVKNKEGEIHLMKDKAKHLDKCLKMLDMSFKDAERGDDTSCENLLDAFSIKLSETHGYGVQEEFTEENKLLEACIFKNNELLKNIQDVQSQISKIGLKDPTVPAVKHRKKSLIRLDKVLDEYEEEKRHLQEMANSLPHFKDGREKTVNQQCQNTVVLWENTKALVTECLEQCGRVLELLKQYQNFKSILTTLIQKEESVISLQASYMGKENLKKRIAEIEIVKEEFNEHLEVVDKINQVCKNLQFYLNKMKTFEEPPFEKEANIIVDRWLDINEKTEDYYENLGRALALWDKLFNLKNVIDEWTEKALQKMELHQLTEEDRERLKEELQVHEQKTSEFSRRVAEIQFLLQSSEIPLELQVMESSILNKMEHVQKCLTGESNCHALSGSTAELREDLDQAKTQIGMTESLLKALSPSDSLEIFTKLEEIQQQILQQKHSMILLENQIGCLTPELSELKKQYESVSDLFNTKKSVLQDHFSKLLNDQCKNFNDWFSNIKVNLKECFESSETKKSVEQKLQKLSDFLTLEGRNSKIKQVDSVLKHVKKHLPKAHVKELISWLVGQEFELEKMESICQARAKELEDSLQQLLRLQDDHRNLRKWLTNQEEKWKGMEEPGEKTELFCQALARKREQFESVAQLNNSLKEYGFTEEEEIIMEATCLMDRYQTLLRQLSEIEEEDKLLPTEDQSFNDLAHDVIHWIKEIKESLMVLNSSEGKMPLEERIQKIKEIILLKPEGDARIETIMKQAESSEAPLVQKTLTDISNQWDNTLHLASTYLSHQEKLLLEGEKYLQSKEDLRLMLIELKKKQEAGFALQHGLQEKKAQLKIYKKFLKKAQDLTSLLKELKSQGNYLLECTKNPSFSEEPWLEIKHLHESLLQQLQDSVQNLDGHVREHDSYQVCVTDLNTTLDNFSKEFVSFSDKPVDQIAVEEKLQKLQELENRLSLQDGTLKKILALAKSVKQNTSSVGQKIIKDDIKSLQCKQKDLENRLASAKQEMECCLNSILKSKRSTEKKGKFTLPGREKQATSDVQESTQESAAVEKLEEDWEINKDSAVEMAMSKQLSLNAQESMKNTEDERKVNELQNQPLELDTMLRNEQLEEIEKLYTQLEAKKAAIKPLEQTECLNKTETGALVLHNIGYSAQHLDNLLQALITLKKNKESQYCVLRDFQEYLAAVESSMKALLTDKESLKVGPLDSVTYLDKIKKFIASIEKEKDSLGNLKIKWENLSNHVTDMDKKLLESQIKQLEHGWEQVEQQIQKKYSQQVVEYDEFTTLMNKVQDTEISLQQQQQHLQLRLKSPEERAGNQSMIALTTDLQATKHGFSVLKGQAELQMKRIWGEKEKKNLEDGINNLKKQWETLEPLHLEAENQIKKCDIRNKMKETILWAKNLLGELNPSIPLLPDDILSQIRKCKVTHDGILARQQSVESLAEEVKDKVPSLTTYEGSDLNNTLEDLRNQYQMLVLKSTQRSQQLEFKLEERSNFFAIIRKFQLMVQESETLIIPRVETAATEAELKHHHVTLEASQKELQEIDSGISTHLQELTNIYEELNVFERLFLEDQLKNLKIRTNRIQRFIQNTCNEVEHKIKFCRQFHEKTSALQEEADSIQRNELLLNQEVNKGVKEEIYNLKDRLTAIKCCILQVLKLKKVFDYIGLNWDFSQLDQLQTQVFEKEKELEEKIKQLDTFEEEHGKYQALLSKMRAIDLQIKKMTEVVLKAPDSSPESRRLNAQILSQRIEKAKCLCDEIIKKLNENKTFDDSFKEKEILQIKLNAEENDKLYKVLQNMVLELSPKELDEKNCQDKLETSLHVLNQIKSQLQQPLLINLEIKHIQNEKDNCEAFQEQVWAEMCSIKAVTAIEKQREENSSEASDVETKLREFEDLQMQLNTSIDLRTNVLNDAYENLTRYKEAVTRAVESITSLEAIIIPYRVDVGNPEESLEMPLRKQEELESTVAHIQDLTEKLGMISSPEAKLQLQYTLQELVSKNSAMKEAFKAQETEAERYLENYKCYRKMEEDIYTNLSKMETVLGQSMSSLPLSYREALERLEQSKALVSNLISTKEELMKLRQILRLLRLRCTENDGICLLKIVSALWEKWLSLLEAAKEWEMWCEELKQEWKFVSEEIEREAIILDNLQEELPEISKTKEAATTEELSELLDCLCQYGENVEKQQLLLTLLLQRIRSIQNVPESSGAVETVPAFQEITSMKERCNKLLQKVQKNKELVQTEIQERHSFTKEIIALKNFFQQTTTSFQNMAFQDHPEKSEQFEELQSILKKGKLTFENIMEKLRIKYSEMYTIVPAEIESQVEECRKALEDIDEKISNEVLKSSPSYAMRRKIEEINNGLHNVEKMLQQKSKNIEKAQEIQKKMWDELDLWHSKLNELDSEVQDIVEQDPGQAQEWMDNLMIPFQQYQQVSQRAECRTSQLNKATVKMEEYSDLLKSTEAWIENTSHLLANPADYDSLRTLSHHASTVQMALEDSEQKHNLLHSIFMDLEDLSIIFETDELTQSIQELSNQVTALQQKIMESLPQIQRMADDVVAIESEVKSMEKRVSKIKTILLSKEIFDFSPEEHLKHGEVILENIRPMKKTIAEIVSYQVELRLPQTGMKPLPVFQRTNQLLQDIKLLENVTQEQNELLKVVIKQTNEWDEEIENLKQILNNYSAQFSLEHMSPDQADKLPQLQGEIERMEKQILSLNQRKEDLLVDLKATVLNLHQHLKQEQEGVERDRLPAVTSEEGGVAERDASERKLNRRGSMSYLAAVEEEVEESSVKSDNGDEKAEPSPQSWSSLWKHDKDMEEDRASSSSGTIVQEAYGKISTSDNSMAQILTPDSLNTEQGPECSLRPNQTEEGTTPPIEADTLDSSDAQGGLEPRVEKTRPEPTEVLHACKTQVAELELWLQQANVAVEPETLNADMQQVLEQQLVGCQAMLTEIEHKVAFLLETCKDQGLGDNGATQHEAEALSLKLKTVKCNLEKVQMMLQEKHSEDQHPTILKKSSEPEHQEALQPVNLSELESIVTERPQFSRQKDFQQQQVLELKPMEQKDFIKFIEFNAKKMWPQYCQHDNDTTQESSASNQASSPENDVPDSILSPQGQNGDKWQYLHHELSSKIKLPLPQLVEPQVSTNMGILPSVTMYNFRYPTTEELKTYTTQLEDLRQEASNLQTQENMTEEAYINLDKKLFELFLTLSQCLSSVEEMLEMPRLYREDGSGQQVHYETLALELKKLYLALSDKKGDLLKAMTWPGENTNLLLECFDNLQVCLEHTQAAAVCRSKSLKAGLDYNRSYQNEIKRLYHQLIKSKTSLQQSLNEISGQSVAEQLQKADAYTVELENAESRVAKLRDEGERLHLPYALLQEVYKLEDVLDSMWGMLRARYTELSSPFVTESQQDALLQGMVELVKIGKEKLAHGHLKQTKSKVALQAQIENHKVFFQKLVADMLLIQAYSAKILPSLLQNRETFWAEQVTEVKILEEKSRQCGMKLQSLLQKWEEFDENYASLEKDLEILISTLPSVSLVEETEERLVERISFYQQIKRNIGGKHARLYQTLNEGKQLVASVSCPELEGQIAKLEEQWLSLNKKIDHELHRLQALLKHLLSYNRDSDQLTKWLESSQHTLNYWKEQSLNVSQDLDTIRSNINNFFEFSKEVDEKSSLKTAVISIGNQLLHLKETDTATLRASLAQFEQKWTMLITQLPDIQEKLHQLQMEKLPSRKAITEMISWMNNVEHQTSDEDSVHSPSSASQVKHLLQKHKEFRMEMDYKQWIVDFVNQSLLQLSTCDVESKRYERTEFAEHLGEMNRQWHRVHGMLNRKIQHLEQLLESITESENKIQILNNWLEAQEERLKTLQKPESVISVQKLLLDCQDIENQLAIKSKALDELKQSYLTLESGAVPLLEDTASRIDELFQKRSSVLTQVNQLKTSMQSVLQEWKIYDQLYDEVNMMTIRFWYCMEHSKPVVLSLETLRCQVENLQSLQDEAESSEGSWEKLQEVIGKLKGLCPSVAEIIEEKCQNTHKRWTQVNQAIADQLQKAQSLLQLWKAYSNAHGEAAARLKQQEAKFQQLANISMSGNNLAEILPPALQDIKELQHDVQKTKEAFLQNSSVLDRLPQPAESSTHMLLPGPLHSLQRAAYLEKMLLVKANEFEFVLSQFKDFGVRLESLKGLIMHEEENLDRLHQQEKENPDSFLNHVLALTAQSPDIEHLNEVSLKLPLSDVAVKTLQNMNRQWIRATATALERCSELQGIGLNEKFLYCCEKWIQLLEKIEEALKVDVANSLPELLEQQKTYKMLEAEVSINQTIADSYVTQSLQLLDTTEIENRPEFITEFSKLTDRWQNAVQGVRQRKGDVDGLVRQWQDFTTSVENLFRFLTDTSHLLSAVKGQERFSLYQTRSLIHELKNKEIHFQRRRTTCALTLEAGEKLLLTTDLKTKESVGRRISQLQDSWKDMEPQLAEMIKQFQSTVETWDQCEKKIKELKSRLQVLKAQSEDPLPELHEDLHNEKELIKELEQSLASWTQNLKELQTMKADLTRHVLVEDVMVLKEQIEHLHRQWEDLCLRVAIRKQEIEDRLNTWVVFNEKNKELCAWLVQMENKVLQTADISIEEMIEKLQKDCMEEINLFSENKLQLKQMGDQLIKASNKSRAAEIDDKLNKINDRWQHLFDVIGSRVKKLKETFAFIQQLDKNMSNLRTWLARIESELSKPVVYDVCDDQEIQKRLAEQQDLQRDIEQHSAGVESVFNICDVLLHDSDACANETECDSIQQTTRSLDRRWRNICAMSMERRMKIEETWRLWQKFLDDYSRFEDWLKSAERTAACPNSSEVLYTSAKEELKRFEAFQRQIHERLTQLELINKQYRRLARENRTDTASRLKQMVHEGNQRWDNLQRRVTAVLRRLRHFTNQREEFEGTRESILVWLTEMDLQLTNVEHFSESDADDKMRQLNGFQQEITLNTNKIDQLIVFGEQLIQKSEPLDAVLIEDELEELHRYCQEVFGRVSRFHRRLTSCTPGLEDEKEASENETDMEDPREIQTDSWRKRGESEEPSSPQSLCHLVAPGHERSGCETPVSVDSIPLEWDHTGDVGGSSSHEEDEEGPYYSALSDVEIPENPEAYLKMTTKTLKASSGKSISDGHSWHVPDSPSCPEHHYKQMEGDRNVPPVPPASSTPYKPPYGKLLLPPGTDGGKEGPRVLNGNPQQEDGGLAGITEQQSGAFDRWEMIQAQELHNKLKIKQNLQQLNSDISAITTWLKKTEAELEMLKMAKPPSDIQEIELRVKRLQEILKAFDTYKALVVSVNVSSKEFLQTESPESTELQSRLRQLSLLWEAAQGAVDSWRGGLRQSLMQCQDFHQLSQNLLLWLASAKNRRQKAHVTDPKADPRALLECRRELMQLEKELVERQPQVDMLQEISNSLLIKGHGEDCIEAEEKVHVIEKKLKQLREQVSQDLMALQGTQNPASPLPSFDEVDSGDQPPATSVPAPRAKFRAVRTTEGEEETESRVPGSTRPQRSFLSRVVRAALPLQLLLLLLLLLACLLPSSEEDYSCTQANNFARSFYPMLRYTNGPPPT

SEQ ID NO: 102 - protein, 363 aa, Homo sapiens
MAQTPAFDKPKVELHVHLDGSIKPETILYYGRRRGIALPANTAEGLLNVIGMDKPLTLPDFLAKFDYYMPAIAGCREAIKRIAYEFVEMKAKEGVVYVEVRYSPHLLANSKVEPIPWNQAEGDLTPDEVVALVGQGLQEGERDFGVKARSILCCMRHQPNWSPKVVELCKKYQQQTVVAIDLAGDETIPGSSLLPGHVQAYQEAVKSGIHRTVHAGEVGSAEVVKEAVDILKTERLGHGYHTLEDQALYNRLRQENMHFEICPWSSYLTGAWKPDTEHAVIRLKNDQANYSLNTDDPLIFKSTLDTDYQMTKRDMGFTEEEFKRLNINAAKSSFLPEDEKRELLDLLYKAYGMPPSASAGQNL

SEQ ID NO: 103 - protein, 4515 aa, Homo sapiens
METFIPIDLTTENQEMDKEETKTKPRLLRYEEKKYEDVKPLETQPAEIAEKETLEYKTVRTFSESLKSEKTEDYLRESIIQQHMVSPEPASLKEKGKSRRKKDQTHACPNVRKARPVSYDRTEPKDDDVIRNIIRLREKLGWQTILPQHSLKYGSSKIAIQKITLKKPLEDDGEFVYCLPRKSPKSLYNPYDLQVVSAHTAKHCKEFWVITASFISKVINIVGSVKEVELIPTLEWLSERRHYYLLRQFKIFSDFRMNKAFVTWKLNVKRIKTEKSRSFLYHHLFLADDLFQTCLVYIRGLCEDAINLKNYNDHENNLSAICLVKLDSSRTYSLDEFCEEQLQQATQALKQLEDIRNKAISEMKSTFLKVAEKNEIKEYFESKLSEDDTTHFKLPKYRRLLETFFKFVMLVDYIFQELIRQLMNTAVTLLLELFNGSAGMPFSVEKKNENLIRTFKDNSFPTGKTTNDCEELVDNSKLHAISVQKSEVKTDTDINEILNSVEVGKDLRKTYAPIFEVNLCLRIPAESDSSENSKENFHESDQCPEECVMFEDEMSENKDNCVKKHSSEELLPKAKKSKEISYNLEDIISDTEIETEFENKYMYYEFPEFPTNLFIDPNRLEFSVKIQNMLTNMEKCITTITPLCQDPQLSIFIDLVSIMDLPNKTGSIIHYKEQTRWPDCHILFETDPAYQNIIVNLLTIIGNSMGLVNAYSHKFIKYCTMTEKAKIMSMKISSMGELTSKEFEAILNRFRNYFRHIVNMAIEKRIGIFNVVSLDYQSECLLYIDNVIHMSHTLIQSVIEKKNKNLLEVVESSLQQLECDPTEIEEFLEHFIFLNAISSKISKLEKEFLTMSQLYSVAKHHQIHISEEQIAIFQVLLLKFSQLKSSMKLSKINKDTAITKFRDNLEACISGLHVDVGNLKAKIRTPLLLCAGTQVSTAMEMIQTLSGEAASLTNKAKAYSHYQDCFSDSQSHMHSVNVEEITQIVLSEISDIEGDLTLRKKLWEAQEEWKRASWEWRNSSLQSIDVESVQRNVSKLMHIISVLEKGLPKSDMVTHLKQVVTEFKQELPIIIALGNPCLKPRHWEALQEIIGKSVPLDKNCKVENLLALKMFQYENEINDMSTSATNEAALEKMLFKIIDFWNTTPLPLILHHTEIYSIFIIPSIDDISAQLEESQVILATIKGSPHIGPIKDLVNEWDQNLTLFSYTLEEWMNCQRNWLYLEPVFHSSEIRRQLPAETELFSQVISMWKKIMSKIQNKQNALQITTSAGVLEILQNCNIHLEHIKKSLEDYLEVKRLIFPRFYFLSNAELLDILADSRNPESVQPHLVKCFENIKQLLIWKQDIGPPAVKMLISAEGEGLVLPKKIRVRSAVEQWLVNVEKSMFDVLKKERYIYNIILLFQSQIMFYNDCVKSFVSSYSREKLEKVHAGLMCHLEEVADLVVLDTSNSRTKAILGALLILYVHCRDIVINLLLKNIFNAEDFEWTRHLQYKWNEKQKLCYVSQGNASFTYGYEYLGCTSRLVITPLTDRCWLTLMEALHLNLGGCPAGPAGTGKTETVKDLAKSLGKHCVVFNCFEDLDYKIVRKFFFGLVQSGAWSCFDEFNLIDLEVLSVIASQILTIKAAKDNYSARFVLEGKEIRINMSCAVFITMNPRYGGGVELPDNLKSLFRPVAMMVPHYQMIAEIILFSFGFKSANSLSGKLTNLYELARKQLSQQDHYNFGLRSLKIVLIMAGTKKREFKCLSEADETLIVIEAIREASLPKCPPEDVPLFENIIGDIFPEVTVLKVNQLALEKVIYTATQQLGLQNWSSQKEKIIQFYNQLQVCVGVMLVGPTGGGKTTVRRILEKALTLLPIADFLSVAERKSASKISERKGKVDICVLNPKCVTLSELYGQLDPNTMEWTDGLLSATIRSYVYFNTPKNTKKDIDLRLKSRISDLSNVFKLDSSDTTETDDNIFEEIEKVVKIPENHNFDWQWIILDGPVDTFWVENLNSVLDDTRTLCLANSERIALTNKIRVIFEVDNLSQASPATVSRCAMVYMDPVDLGWEPYVKSWLLKTSKIISQSGVDCLEFMIKNSVTDGLQFIRNRQKFQPYPMEDITVVITLCRILDAFFDFMGKNGGFEQSDDLNDTSSKEANSQRESVTFKDIEKRDENTWYPEKNPDKLTKIIQKLFVFAFTWAFGGALNREDEHRENIPFCPSLEPDSLAKVTYDFDKLVHELFGNSSQVGWKHWGQSQGRRRKGNCINLPTGECSIFGYFVDIEQCEFIPWSDLVPNDQTLIQRGTSLLTNLQRSGGNFLKITECGECINYTATRDTTCLSFLMSLLLKNSCPVLLTGESGVGKTAAINQMLEKLEGPGAFDIKHGSILGDTLLYSEIKKSSSLKQNITILIPETHKTATGSSDNPTKKPEVRTNKKLLKNNDHKGVVVSTINFSTNVTAAKTKEMILKKLIRRTKDTLGAPKNNRILIFIDDMNMPVSDMYGAQPPLELIRQLLDLGGVYDTEKNTWKNIQDLSIVAACVPVVNDISPRLLKHFSMLVLPHPSQDILCTIFQAHLGIYFSINNFTPEVQKSKDQIISCSLAIYHQVRQNMLPTPTKCHYMFNLRDMFKLLLGLLQADRTVVNSKEMAALLFVHEATRVFHDRLIDFTDKSLFYRLLSRELENCFQIGIDGCGKKTCATLACYLTDNKLYRVPISHKCAYIEFKEVFKKVFIHAGLKGKPTVLMVPNLNIEQDSFLEDLNYIISSGRIPDLFENVELDSIAMKIRYLTEQSGHMDNRQSLLSFFQKRIYKNLHIFVIMSPEGPSFRQNCRVYPSMISSCTIDWYERWPEEALLIVANSFLKEKVNFENRENLKEKLAPTCVQIHKSMKDLNRKYFEETGRFYYTTPNSYLQFMETFAHILRAREEEMQTKRDRFHMGLSTILEATTLVTEMQEELLILGPQVEQKTKETETLMEKLRKDSQVVEKVQMLVKQDEEIVAEEVRIVEDYAQKTANELKSVLPAFDKAIVALNALDKADVAELRVYTRPPFLVLTVMNAVCILLQKKPNWATAKLLLSETGFLKKLINLDKDSIPDKVFVKLKKIVTLPDFNPHKISLVSVACCSLCQWVIALNNYHEVQKVVGPKQIQVAEAQNVLKIARQRLAEKQRGLQLVEEHLLFLQAAYKDTVAEKQLLANRKTMASRRFQCASVLLTVLEDEKTRWQETINQIDNKLEGILGDILLSAACIVYSGILTPEFRQLIVNKWETFCIENGISLSSKFSLIKVMAQKYEISRWHNQGLPHGQYSVENAILIKNGQQWPLLIDPHRQAHKWIRQMEGSRLQKLSIEDSNYTKKIENAMKTGGSVLLQNLLETLAPGLKAILKKDIYQKKGHYFIRVGDAEFEYNSNFRLYLSTEIDNPHFLPSVYNFVTMINFTVTFQGLQDQLLSTVVTHEVPHLEDQRSKLLESISLDAITLEELEEKTLNLLQKALGSILDDDKIVDTLRKSKMTSNEISKRIEATKKAESEIQAIRKNYLPIATRGALLYFLVADLTQINYMYQFSLDWFHQVFVSSVVSKSKEQEHSFKREKVSPKEVHEFISISKEPNLENEKNLLDKHIKSAIDMLTKSIFKVVSSALFNEDKLCFSFRLCTVIMQNNANGNLIQDDIGFLPEEEWNIFLYSGILINIKSALSQSRLTSTFEIGESQHLQWLSDSRWRQCQYVSTHLEPFSLLCKSLLSNVSQWDTFKNSKAVYSLISTPFSSENASLEENTKPPEETELLNENKETCNPINFPWEKLTSFQRLILVKVLRPESLNNSVRKFITEKMGNKYLQRTGVNLKDAYKGSNARTPLILIQTHGIDLTNILLRFAQELKGTTHHVTIISLGRDQAAKAEDLILKALTKTQQWVFLQNCHLATSFMPRLCTIVESFNSPNVTIDPEFRLWLSSKSYSSFPIPVLKKGLKIAVESPQGLKSNLLQTFGCTGSGEVTEEIFENPDCGQWWKKLLFSLCFFNAVINERKNYGILGWNIAYKFNSSDLGVAIKVLENSLRGQPSISWQALRYLIGEVIYGGRVIDNWDKRCLKTLLYKFCNPEVLKDDFSFSRSASIKDYIHIIQSLPDDDLPEVLGIHPEAIRSCWETQGEKFIENLIAMQPKTTTANLMIRPEQSKDELVMEILSDLLKRLPLTVEKEEIAVGTPSTLKSMMSSSIWESLSKNLKDHDPLIHCVLLTFLKQEIKRFDKLLFVIHKSLKDLQLAIKGEIILTQELEEIFNSFLNMRVPTLWQKHAYRSCKPLSSWIDDLIQRLNFFNTWAKVAYTAIQRRYMRFVTVWKQSIPSTSQKCKHPEDSENNFFEGFPSRYWLPAFFFPQAFLAAVLQDYGRSRGIAVDALTFTHHVISNTTDKDEKFSVFMPKKLNIVRRAFKGSASSHTGVYIFGLFIEGARWNREQKILEDSLPLEMCCDFPDIYFLPTKISTKTPNASNQTDSELYAFECPVYQTPERSRILATTGLPTNFLTSVYLSTKKPPSHWITMRVALLCEKNEK

SEQ ID NO: 104 - protein, 4128 aa, Homo sapiens [sequence omitted]

SEQ ID NO: 105 - protein, 5604 aa, Homo sapiens
MTTQAPTFTQPLQSVVVLEGSTATFEAHISGFPVPEVSWFRDGQVISTSTLPGVQISFSDGRAKLTIPAVTKANSGRYSLKATNGSGQATSTAELLVKAETAPPNFVQRLQSMTVRQGSQVRLQVRVTGIPTPVVKFYRDGAEIQSSLDFQISQEGDLYSLLIAEAYPEDSGTYSVNATNSVGRATSTAELLVQGEEEVPAKKTKTIVSTAQISESRQTRIEKKIEAHFDARSIATVEMVIDGAAGQQLPHKTPPRIPPKPKSRSPTPPSIAAKAQLARQQSPSPIRHSPSPVRHVRAPTPSPVRSVSPAARISTSPIRSVRSPLLMRKTQASTVATGPEVPPPWKQEGYVASSSEAEMRETTLTTSTQIRTEERWEGRYGVQEQVTISGAAGAAASVSASASYAAEAVATGAKEVKQDADKSAAVATVVAAVDMARVREPVISAVEQTAQRTTTTAVHIQPAQEQVRKEAEKTAVTKVVVAADKAKEQELKSRTKEVITTKQEQMHVTHEQIRKETEKTFVPKVVISAAKAKEQETRISEEITKKQKQVTQEAIRQETEITAASMVVVATAKSTKLETVPGAQEETTTQQDQMHLSYEKIMKETRKTVVPKVIVATPKVKEQDLVSRGREGITTKREQVQITQEKMRKEAEKTALSTIAVATAKAKEQETILRTRETMATRQEQIQVTHGKVDVGKKAEAVATVVAAVDQARVREPREPGHLEESYAQQTTLEYGYKERISAAKVAEPPQRPASEPHVVPKAVKPRVIQAPSETHIKTTDQKGMHISSQIKKTTDLTTERLVHVDKRPRTASPHFTVSKISVPKTEHGYEASIAGSAIATLQKELSATSSAQKITKSVKAPTVKPSETRVRAEPTPLPQFPFADTPDTYKSEAGVEVKKEVGVSITGTTVREERFEVLHGREAKVTETARVPAPVEIPVTPPTLVSGLKNVTVIEGESVTLECHISGYPSPTVTWYREDYQIESSIDFQITFQSGIARLMIREAFAEDSGRFTCSAVNEAGTVSTSCYLAVQVSEEFEKETTAVTEKFTTEEKRFVESRDVVMTDTSLTEEQAGPGEPAAPYFITKPVVQKLVEGGSVVFGCQVGGNPKPHVYWKKSGVPLTTGYRYKVSYNKQTGECKLVISMTFADDAGEYTIVVRNKHGETSASASLLEEADYELLMKSQQEMLYQTQVTAFVQEPKVGETAPGFVYSEYEKEYEKEQALIRKKMAKDTVVVRTYVEDQEFHISSFEERLIKEIEYRIIKTTLEELLEEDGEEKMAVDISESEAVESGFDSRIKNYRILEGMGVTFHCKMSGYPLPKIAWYKDGKRIKHGERYQMDFLQDGRASLRIPVVLPEDEGIYTAFASNIKGNAICSGKLYVEPAAPLGAPTYIPTLEPVSRIRSLSPRSVSRSPIRMSPARMSPARMSPARMSPARMSPGRRLEETDESQLERLYKPVFVLKPVSFKCLEGQTARFDLKVVGRPMPETFWFHDGQQIVNDYTHKVVIKEDGTQSLIIVPATPSDSGEWTVVAQNRAGRSSISVILTVEAVEHQVKPMFVEKLKNVNIKEGSRLEMKVRATGNPNPDIVWLKNSDIIVPHKYPKIRIEGTKGEAALKIDSTVSQDSAWYTATAINKAGRDTTRCKVNVEVEFAEPEPERKLIIPRGTYRAKEIAAPELEPLHLRYGQEQWEEGDLYDKEKQQKPFFKKKLTSLRLKRFGPAHFECRLTPIGDPTMVVEWLHDGKPLEAANRLRMINEFGYCSLDYGVAYSRDSGIITCRATNKYGTDHTSATLIVKDEKSLVEESQLPEGRKGLQRIEELERMAHEGALTGVTTDQKEKQKPDIVLYPEPVRVLEGETARFRCRVTGYPQPKVNWYLNGQLIRKSKRFRVRYDGIHYLDIVDCKSYDTGEVKVTAENPEGVIEHKVKLEIQQREDFRSVLRRAPEPRPEFHVHEPGKLQFEVQKVDRPVDTTETKEVVKLKRAERITHEKVPEESEELRSKFKRRTEEGYYEAITAVELKSRKKDESYEELLRKTKDELLHWTKELTEEEKKALAEEGKITIPTFKPDKIELSPSMEAPKIFERIQSQTVGQGSDAHFRVRVVGKPDPECEWYKNGVKIERSDRIYWYWPEDNVCELVIRDVTAEDSASIMVKAINIAGETSSHAFLLVQAKQLITFTQELQDVVAKEKDTMATFECETSEPFVKVKWYKDGMEVHEGDKYRMHSDRKVHFLSILTIDTSDAEDYSCVLVEDENVKTTAKLIVEGAVVEFVKELQDIEVPESYSGELECIVSPENIEGKWYHNDVELKSNGKYTITSRRGRQNLTVKDVTKEDQGEYSFVIDGKKTTCKLKMKPRPIAILQGLSDQKVCEGDIVQLEVKVSLESVEGVWMKDGQEVQPSDRVHIVIDKQSHMLLIEDMTKEDAGNYSFTIPALGLSTSGRVSVYSVDVITPLKDVNVIEGTKAVLECKVSVPDVTSVKWYLNDEQIKPDDRVQAIVKGTKQRLVINRTHASDEGPYKLIVGRVETNCNLSVEKIKIIRGLRDLTCTETQNVVFEVELSHSGIDVLWNFKDKEIKPSSKYKIEAHGKIYKLTVLNMMKDDEGKYTFYAGENMTSGKLTVAGGAISKPLTDQTVAESQEAVFECEVANPDSKGEWLRDGKHLPLTNNIRSESDGHKRRLIIAATKLDDIGEYTYKVATSKTSAKLKVEAVKIKKTLKNLTVTETQDAVFTVELTHPNVKGVQWIKNGVVLESNEKYAISVKGTIYSLRIKNCAIVDESVYGFRLGRLGASARLHVETVKIIKKPKDVTALENATVAFEVSVSHDTVPVKWFHKSVEIKPSDKHRLVSERKVHKLMLQNISPSDAGEYTAVVGQLECKAKLFVETLHITKTMKNIEVPETKTASFECEVSHFNVPSMWLKNGVEIEMSEKFKIVVQGKLHQLIIMNTSTEDSAEYTFVCGNDQVSATLTVTPIMITSMLKDINAEEKDTITFEVTVNYEGISYKWLKNGVEIKSTDKCQMRTKKLTHSLNIRNVHFGDAADYTFVAGKATSTATLYVEARHIEFRKHIKDIKVLEKKRAMFECEVSEPDITVQWMKDDQELQITDRIKIQKEKYVHRLLIPSTRMSDAGKYTVVAGGNVSTAKLFVEGRDVRIRSIKKEVQVIEKQRAVVEFEVNEDDVDAHWYKDGIEINFQVQERHKYVVERRIHRMFISETRQSDAGEYTFVAGRNRSSVTLYVNAPEPPQVLQELQPVTVQSGKPARFCAVISGRPQPKISWYKEEQLLSTGFKCKFLHDGQEYTLLLIEAFPEDAAVYTCEAKNDYGVATTSASLSVEVPEVVSPDQEMPVYPPAIITPLQDTVTSEGQPARFQCRVSGTDLKVSWYSKDKKIKPSRFFRMTQFEDTYQLEIAEAYPEDEGTYTFVASNAVGQVSSTANLSLEAPESILHERIEQEIEMEMKELFSEGESEHSERDTRDAFSDSEDIDHKSMAAKRYASRISSTSSWPEYFKPSFTQKLTFKYVLEGEPVVFTCRLIACPTPEMTWFHNNRPIPTGLRRIIKAESDLHHHSSSLEIKRVQDRDSGSYRLLAINSEGSAESTASLLVIQKGQDEKYLEFLKRAERTHENVEALVERGEDRIKVDLRFTGSPFNKKQDVEQKGMMRTIHFKTMSSAKKTDYMYDEEYLESKSDIRGWLNVGESFLDKETKVKLQRLREARKTLMEKKKLSLLDTSSEISSRTLRSEASDKDILFSREDMKIRSMSDLAESYKVDHSAESIVQNPHALSNQMDQNIESEELPTSFQTIVDEEIFQTEIRMSQEALVKESLPKDHLYGEILVNENTQARGQLEEIMANTTIGESSTYITNVCEKEEVYETPENVSQAITPHASESFGTLVNVEESEEIASERIKKDDLRELQLSASTRIDEFKTEQKEENMRFFENSFRKRPQRCPPSFLQEIESQEVYEGDSCNFVCHFQGYPQPIVTWYNNDMPIPRNQNFIIHSLENYSILTLSSVHHQNEGSITCVLFNQYGTVKTTSMLKVKAKQKHDVKAHKVPVFHDYLDEEEELALVFDQAKGAHPSMSQEGQTNLHLLKTNPPVPPSGDTELLSFPVEIQVTAATPIPEQDKESKEVFQTEELEPKAMPQDQVTQSPKHRFVFLSDITNEPPKMLQEMPKHARCREGDSIILECLISGEPQPVVTWFQNGVLLKQNQKFQFEEVNCSHQLYIKDVNSQDSGKYKCVAENNSGAVESVSDLTVEPVTYRENSQFENIGEIYGKYSRDQQLQDQGESVRAHFYDYPAGPFTPWTNVKEYSVRDYFQSLETIEQIDQKEQVRCIPSREKIPRFVHGASRTIKISKPIRAEFIQCQAEGKERHVSEKSKLHQAEGTVYPFVDDFSDVTIKKEIRNNFGKLGRSEKENVQECAQSDYLPNIHSERISDSYNTKDSSAIVYEESLGEEIHYPGKKVKHRIIEFEKLHVEKGVLEKRPTRTSIVNPPQKKIDDKAFSLKQRESRSSNLNANMYQAEKMSPNTESDSSNIAINLKLLSSQTHKEFDAQEREQQEKISLIDKPAISKRAEHESPITFDLKQFHTQIKHTDVKFQELDSGQPEEAYFKIQHPADTENIVFDLKQMYSHIGDPALEFQGQETREQQEIHYKEKIPSPETLQPDTHNISKSVQNNVFASQEISSSQELSNRTMVEKSSIDENSISLEKEVRHVQEQNLDILKTDLSLKSFSEEIYSESCALLPTSSADIEETDLSEKSCPLENGGRSSISHLKKAASEEKPLGVGEMEEECTLEPELAAFPKQDGGTQEYTDATLEDHRGDVQEADTLHRQLSLSQCFPLLMTEEQQNPGEQISTNIHASGEEKCYEEVQVQNEASFSTLEGEMIETSFSQNIPKLDEAHTTEAAESETSLTQYLLAAGKREVPETKDTRDQAKLVQSESITSMEVEEVTFNTVYEYYNQKQESLGRPLSPESDISIGVGSTTSEEISELDQFYTPPSSVEYFESPKSPDLYFNPSDITKQSSIHSGGETVERYSTPLGEVAERYSTPSEGEVGERYSTPPGETLERYSTPPGETLERYSTPPGETLERYSTPPGETLERYSTPPGETLERYSTPPGEALERYSIPTGGPNPTGTFKTYPSKIEREDGTPNEHFYTPTEERGSAYEIWRSDSFGTPNEAIEPKDNEMPPSFIEPLTKRKVYENTTLGFIVEVEGLPVPGVKWYRNKSLLEPDERIKMERVGNVCSLEISNIQKGEGGEYMCHAVNIIGEAKSFANVDIMPQEERVVALPPPVTHQHVMEFDLEHTTSSRTPSPQEIVLEVELSEKDVKEFEKQVKIVTVPEFTPDHKSMIVSLDVLPFNFVDPNMDSREGEDKELKIDLEVFEMPPRFIMPICDFKIPENSDAVFKCSVIGIPTPEVKWYKEYMCIEPDNIKYVISEEKGSHTLKIRNVCLSDSATYRCRAVNCVGEAICRGFLTMGDSEIFAVIAKKSKVTLSSLMEELVLKSNYTDSFFEFQVVEGPPRFIKGISDCYAPIGTAAYFQCLVRGSPRPTVYWYKDGKLVQGRRFTVEESGTGFHNLFITSLVKSDEGEYRCVATNKSGMAESFAALTLT

SEQ ID NO: 106 - protein, 3418 aa, Homo sapiens
MPIGSKERPTFFEIFKTRCNKADLGPISLNWFEELSSEAPPYNSEPAEESEHKNNNYEPNLFKTPQRKPSYNQLASTPIIFKEQGLTLPLYQSPVKELDKFKLDLGRNVPNSRHKSLRTVKTKMDQADDVSCPLLNSCLSESPVVLQCTHVTPQRDKSVVCGSLFHTPKFVKGRQTPKHISESLGAEVDPDMSWSSSLATPPTLSSTVLIVRNEEASETVFPHDTTANVKSYFSNHDESLKKNDRFIASVTDSENTNQREAASHGFGKTSGNSFKVNSCKDHIGKSMPNVLEDEVYETVVDTSEEDSFSLCFSKCRTKNLQKVRTSKTRKKIFHEANADECEKSKNQVKEKYSFVSEVEPNDTDPLDSNVANQKPFESGSDKISKEVVPSLACEWSQLTLSGLNGAQMEKIPLLHISSCDQNISEKDLLDTENKRKKDFLTSENSLPRISSLPKSEKPLNEETVVNKRDEEQHLESHTDCILAVKQAISGTSPVASSFQGIKKSIFRIRESPKETFNASFSGHMTDPNFKKETEASESGLEIHTVCSQKEDSLCPNLIDNGSWPATTTQNSVALKNAGLISTLKKKTNKFIYAIHDETSYKGKKIPKDQKSELINCSAQFEANAFEAPLTFANADSGLLHSSVKRSCSQNDSEEPTLSLTSSFGTILRKCSRNETCSNNTVISQDLDYKEAKCNKEKLQLFITPEADSLSCLQEGQCENDPKSKKVSDIKEEVLAAACHPVQHSKVEYSDTDFQSQKSLLYDHENASTLILTPTSKDVLSNLVMISRGKESYKMSDKLKGNNYESDVELTKNIPMEKNQDVCALNENYKNVELLPPEKYMRVASPSRKVQFNQNTNLRVIQKNQEETTSISKITVNPDSEELFSDNENNFVFQVANERNNLALGNTKELHETDLTCVNEPIFKNSTMVLYGDTGDKQATQVSIKKDLVYVLAEENKNSVKQHIKMTLGQDLKSDISLNIDKIPEKNNDYMNKWAGLLGPISNHSFGGSFRTASNKEIKLSEHNIKKSKMFFKDIEEQYPTSLACVEIVNTLALDNQKKLSKPQSINTVSAHLQSSVVVSDCKNSHITPQMLFSKQDFNSNHNLTPSQKAEITELSTILEESGSQFEFTQFRKPSYILQKSTFEVPENQMTILKTTSEECRDADLHVIMNAPSIGQVDSSKQFEGTVEIKRKFAGLLKNDCNKSASGYLTDENEVGFRGFYSAHGTKLNVSTEALQKAVKLFSDIENISEETSAEVHPISLSSSKCHDSVVSMFKIENHNDKTVSEKNNKCQLILQNNIEMTTGTFVEEITENYKRNTENEDNKYTAASRNSHNLEFDGSDSSKNDTVCIHKDETDLLFTDQHNICLKLSGQFMKEGNTQIKEDLSDLTFLEVAKAQEACHGNTSNKEQLTATKTEQNIKDFETSDTFFQTASGKNISVAKESFNKIVNFFDQKPEELHNFSLNSELHSDIRKNKMDILSYEETDIVKHKILKESVPVGTGNQLVTFQGQPERDEKIKEPTLLGFHTASGKKVKIAKESLDKVKNLFDEKEQGTSEITSFSHQWAKTLKYREACKDLELACETIEITAAPKCKEMQNSLNNDKNLVSIETVVPPKLLSDNLCRQTENLKTSKSIFLKVKVHENVEKETAKSPATCYTNQSPYSVIENSALAFYTSCSRKTSVSQTSLLEAKKWLREGIFDGQPERINTADYVGNYLYENNSNSTIAENDKNHLSEKQDTYLSNSSMSNSYSYHSDEVYNDSGYLSKNKLDSGIEPVLKNVEDQKNTSFSKVISNVKDANAYPQTVNEDICVEELVTSSSPCKNKNAAIKLSISNSNNFEVGPPAFRIASGKIVCVSHETIKKVKDIFTDSFSKVIKENNENKSKICQTKIMAGCYEALDDSEDILHNSLDNDECSTHSHKVFADIQSEEILQHNQNMSGLEKVSKISPCDVSLETSDICKCSIGKLHKSVSSANTCGIFSTASGKSVQVSDASLQNARQVFSEIEDSTKQVFSKVLFKSNEHSDQLTREENTAIRTPEHLISQKGFSYNVVNSSAFSGFSTASGKQVSILESSLHKVKGVLEEFDLIRTEHSLHYSPTSRQNVSKILPRVDKRNPEHCVNSEMEKTCSKEFKLSNNLNVEGGSSENNHSIKVSPYLSQFQQDKQQLVLGTKVSLVENIHVLGKEQASPKNVKMEIGKTETFSDVPVKTNIEVCSTYSKDSENYFETEAVEIAKAFMEDDELTDSKLPSHATHSLFTCPENEEMVLSNSRIGKRRGEPLILVGEPSIKRNLLNEFDRIIENQEKSLKASKSTPDGTIKDRRLFMHHVSLEPITCVPFRTTKERQEIQNPNFTAPGQEFLSKSHLYEHLTLEKSSSNLAVSGHPFYQVSATRNEKMRHLITTGRPTKVFVPPFKTKSHFHRVEQCVRNINLEENRQKQNIDGHGSDDSKNKINDNEIHQFNKNNSNQAAAVTFTKCEEEPLDLITSLQNARDIQDMRIKKKQRQRVFPQPGSLYLAKTSTLPRISLKAAVGGQVPSACSHKQLYTYGVSKHCIKINSKNAESFQFHTEDYFGKESLWTGKGIQLADGGWLIPSNDGKAGKEEFYRALCDTPGVDPKLISRIWVYNHYRWIIWKLAAMECAFPKEFANRCLSPERVLLQLKYRYDTEIDRSRRSAIKKIMERDDTAAKTLVLCVSDIISLSANISETSSNKTSSADTQKVAIIELTDGWYAVKAQLDPPLLAVLKNGRLTVGQKIILHGAELVGSPDACTPLEAPESLMLKISANSTRPARWYTKLGFFPDPRPFPLPLSSLFSDGGNVGCVDVIIQRAYPIQWMEKTSSGLYIFRNEREEEKEAAKYVEAQQKRLEALFTKIQEEFEEHEENTTKPYLPSRALTRQQVRALQDGAELYEAVKNAADPAYLEGYFSEEQLRALNNHRQMLNDKKQAQIQLEIRKAMESAEQKEQGLSRDVTTVWKLRIVSYSKKEKDSVILSIWRPSSDLYSLLTEGKRYRIYHLATSKSKSKSERANIQLAATKKTQYQQLPVSDEILFQIYQPREPLHFSKFLDPDFQPSCSEVDLIGFVVSVVKKTGLAPFVYLSDECYNLLAIKFWIDLNEDIIKPHMLIAASNLQWRPESKSGLLTLFAGDFSVFSASPKEGHFQETFNKMKNTVENIDILCNEAENKLMHILHANDPKWSTPTKDCTSGPYTAQIIPGTGNKLLMSSPNCEIYYQSPLSLCMAKRKSVSTPVSAQMTSKSCKGEKEIDDQKNCKKRRALDFLSRLPLPPPVSPICTFVSPAAQKAFQPPRSCGTKYETPIKKKELNSPQMTPFKKFNEISLLESNSIADEELALINTQALLSGSTGEKQFISVSESTRTAPTSSEDYLRLKRRCTTSLIKEQESSQASTEECEKNKQDTITTKKYI

SEQ ID NO: 107 - protein, 509 aa, Homo sapiens
MQSWSRVYCSLAKRGHFNRISHGLQGLSAVPLRTYADQPIDADVTVIGSGPGGYVAAIKAAQLGFKTVCIEKNETLGGTCLNVGCIPSKALLNNSHYYHMAHGKDFASRGIEMSEVRLNLDKMMEQKSTAVKALTGGIAHLFKQNKVVHVNGYGKITGKNQVTATKADGGTQVIDTKNILIATGSEVTPFPGITIDEDTIVSSTGALSLKKVPEKMVVIGAGVIGVELGSVWQRLGADVTAVEFLGHVGGVGIDMEISKNFQRILQKQGFKFKLNTKVTGATKKSDGKIDVSIEAASGGKAEVITCDVLLVCIGRRPFTKNLGLEELGIELDPRGRIPVNTRFQTKIPNIYAIGDVVAGPMLAHKAEDEGIICVEGMAGGAVHIDYNCVPSVIYTHPEVAWVGKSEEQLKEEGIEYKVGKFPFAANSRAKTNADTDGMVKILGQKSTDRVLGAHILGPGAGEMVNEAALALEYGASCEDIARVCHAHPTLSEAFREANLAASFGKSINF

SEQ ID NO: 108 - protein, 4911 aa, Homo sapiens
MSSEEDKSVEQPQPPPPPPEEPGAPAPSPAAADKRPRGRPRKDGASPFQRARKKPRSRGKTAVEDEDSMDGLETTETETIVETEIKEQSAEEDAEAEVDNSKQLIPTLQRSVSEESANSLVSVGVEAKISEQLCAFCYCGEKSSLGQGDLKQFRITPGFILPWRNQPSNKKDIDDNSNGTYEKMQNSAPRKQRGQRKERSPQQNIVSCVSVSTQTASDDQAGKLWDELSLVGLPDAIDIQALFDSTGTCWAHHRCVEWSLGVCQMEEPLLVNVDKAVVSGSTERCAFCKHLGATIKCCEEKCTQMYHYPCAAGAGTFQDFSHIFLLCPEHIDQAPERSKEDANCAVCDSPGDLLDQFFCTTCGQHYHGMCLDIAVTPLKRAGWQCPECKVCQNCKQSGEDSKMLVCDTCDKGYHTFCLQPVMKSVPTNGWKCKNCRICIECGTRSSSQWHHNCLICDNCYQQQDNLCPFCGKCYHPELQKDMLHCNMCKRWVHLECDKPTDHELDTQLKEEYICMYCKHLGAEMDRLQPGEEVEIAELTTDYNNEMEVEGPEDQMVFSEQAANKDVNGQESTPGIVPDAVQVHTEEQQKSHPSESLDTDSLLIAVSSQHTVNTELEKQISNEVDSEDLKMSSEVKHICGEDQIEDKMEVTENIEVVTHQITVQQEQLQLLEEPETVVSREESRPPKLVMESVTLPLETLVSPHEESISLCPEEQLVIERLQGEKEQKENSELSTGLMDSEMTPTIEGCVKDVSYQGGKSIKLSSETESSFSSSADISKADVSSSPTPSSDLPSHDMLHNYPSALSSSAGNIMPTTYISVTPKIGMGKPAITKRKFSPGRPRSKQGAWSTHNTVSPPSWSPDISEGREIFKPRQLPGSAIWSIKVGRGSGFPGKRRPRGAGLSGRGGRGRSKLKSGIGAVVLPGVSTADISSNKDDEENSMHNTVVLFSSSDKFTLNQDMCVVCGSFGQGAEGRLLACSQCGQCYHPYCVSIKITKVVLSKGWRCLECTVCEACGKATDPGRLLLCDDCDISYHTYCLDPPLQTVPKGGWKCKWCVWCRHCGATSAGLRCEWQNNYTQCAPCASLSSCPVCYRNYREEDLILQCRQCDRWMHAVCQNLNTEEEVENVADIGFDCSMCRPYMPASNVPSSDCCESSLVAQIVTKVKELDPPKTYTQDGVCLTESGMTQLQSLTVTVPRRKRSKPKLKLKIINQNSVAVLQTPPDIQSEHSRDGEMDDSREGELMDCDGKSESSPEREAVDDETKGVEGTDGVKKRKRKPYRPGIGGFMVRQRSRTGQGKTKRSVIRKDSSGSISEQLPCRDDGWSEQLPDTLVDESVSVTESTEKIKKRYRKRKNKLEETFPAYLQEAFFGKDLLDTSRQSKISLDNLSEDGAQLLYKTNMNTGFLDPSLDPLLSSSSAPTKSGTHGPADDPLADISEVLNTDDDILGIISDDLAKSVDHSDIGPVTDDPSSLPQPNVNQSSRPLSEEQLDGILSPELDKMVTDGAILGKLYKIPELGGKDVEDLFTAVLSPANTQPTPLPQPPPPTQLLPIHNQDAFSRMPLMNGLIGSSPHLPHNSLPPGSGLGTFSAIAQSSYPDARDKNSAFNPMASDPNNSWTSSAPTVEGENDTMSNAQRSTLKWEKEEALGEMATVAPVLYTNINFPNLKEEFPDWTTRVKQIAKLWRKASSQERAPYVQKARDNRAALRINKVQMSNDSMKRQQQQDSIDPSSRIDSELFKDPLKQRESEHEQEWKFRQQMRQKSKQQAKIEATQKLEQVKNEQQQQQQQQFGSQHLLVQSGSDTPSSGIQSPLTPQPGNGNMSPAQSFHKELFTKQPPSTPTSTSSDDVFVKPQAPPPPPAPSRIPIQDSLSQAQTSQPPSPQVFSPGSSNSRPPSPMDPYAKMVGTPRPPPVGHSFSRRNSAAPVENCTPLSSVSRPLQMNETTANRPSPVRDLCSSSTTNNDPYAKPPDTPRPVMTDQFPKSLGLSRSPVVSEQTAKGPIAAGTSDHFTKPSPRADVFQRQRIPDSYARPLLTPAPLDSGPGPFKTPMQPPPSSQDPYGSVSQASRRLSVDPYERPALTPRPIDNFSHNQSNDPYSQPPLTPHPAVNESFAHPSRAFSQPGTISRPTSQDPYSQPPGTPRPVVDSYSQSSGTARSNTDPYSQPPGTPRPTTVDPYSQQPQTPRPSTQTDLFVTPVTNQRHSDPYAHPPGTPRPGISVPYSQPPATPRPRISEGFTRSSMTRPVLMPNQDPFLQAAQNRGPALPGPLVRPPDTCSQTPRPPGPGLSDTFSRVSPSAARDPYDQSPMTPRSQSDSFGTSQTAHDVADQPRPGSEGSFCASSNSPMHSQGQQFSGVSQLPGPVPTSGVTDTQNTVNMAQADTEKLRQRQKLREIILQQQQQKKIAGRQEKGSQDSPAVPHPGPLQHWQPENVNQAFTRPPPPYPGNIRSPVAPPLGPRYAVFPKDQRGPYPPDVASMGMRPHGFRFGFPGGSHGTMPSQERFLVPPQQIQGSGVSPQLRRSVSVDMPRPLNNSQMNNPVGLPQHFSPQSLPVQQHNILGQAYIELRHRAPDGRQRLPFSAPPGSVVEASSNLRHGNFIPRPDFPGPRHTDPMRRPPQGLPNQLPVHPDLEQVPPSQQEQGHSVHSSSMVMRTLNHPLGGEFSEAPLSTSVPSETTSDNLQITTQPSDGLEEKLDSDDPSVKELDVKDLEGVEVKDLDDEDLENLNLDTEDGKVVELDTLDNLETNDPNLDDLLRSGEFDIIAYTDPELDMGDKKSMFNEELDLPIDDKLDNQCVSVEPKKKEQENKTLVLSDKHSPQKKSTVTNEVKTEVLSPNSKVESKCETEKNDENKDNVDTPCSQASAHSDLNDGEKTSLHPCDPDLFEKRTNRETAGPSANVIQASTQLPAQDVINSCGITGSTPVLSSLLANEKSDNSDIRPSGSPPPPTLPASPSNHVSSLPPFIAPPGRVLDNAMNSNVTVVSRVNHVFSQGVQVNPGLIPGQSTVNHSLGTGKPATQTGPQTSQSGTSSMSGPQQLMIPQTLAQQNRERPLLLEEQPLLLQDLLDQERQEQQQQRQMQAMIRQRSEPFFPNIDFDAITDPIMKAKMVALKGINKVMAQNNLGMPPMVMSRFPFMGQVVTGTQNSEGQNLGPQAIPQDGSITHQISRPNPPNFGPGFVNDSQRKQYEEWLQETQQLLQMQQKYLEEQIGAHRKSKKALSAKQRTAKKAGREFPEEDAEQLKHVTEQQSMVQKQLEQIRKQQKEHAELIEDYRIKQQQQCAMAPPTMMPSVQPQPPLIPGATPPTMSQPTFPMVPQQLQHQQHTTVISGHTSPVRMPSLPGWQPNSAPAHLPLNPPRIQPPIAQLPIKTCTPAPGTVSNANPQSGPPPRVEFDDNNPFSESFQERERKERLREQQERQRIQLMQEVDRQRALQQRMEMEQHGMVGSEISSSRTSVSQIPFYSSDLPCDFMQPLGPLQQSPQHQQQMGQVLQQQNIQQGSINSPSTQTFMQTNERRQVGPPSFVPDSPSIPVGSPNFSSVKQGHGNLSGTSFQQSPVRPSFTPALPAAPPVANSSLPCGQDSTITHGHSYPGSTQSLIQLYSDIIPEEKGKKKRTRKKKRDDDAESTKAPSTPHSDITAPPTPGISETTSTPAVSTPSELPQQADQESVEPVGPSTPNMAAGQLCTELENKLPNSDFSQATPNQQTYANSEVDKLSMETPAKTEEIKLEKAETESCPGQEEPKLEEQNGSKVEGNAVACPVSSAQSPPHSAGAPAAKGDSGNELLKHLLKNKKSSSLLNQKPEGSICSEDDCTKDNKLVEKQNPAEGLQTLGAQMQGGFGCGNQLPKTDGGSETKKQRSKRTQRTGEKAAPRSKKRKKDEEEKQAMYSSTDTFTHLKQQNNLSNPPTPPASLPPTPPPMACQKMANGFATTEELAGKAGVLVSHEVTKTLGPKPFQLPFRPQDDLLARALAQGPKTVDVPASLPTPPHNNQEELRIQDHCGDRDTPDSFVPSSSPESVVGVEVSRYPDLSLVKEEPPEPVPSPIIPILPSTAGKSSESRRNDIKTEPGTLYFASPFGPSPNGPRSGLISVAITLHPTAAENISSVVAAFSDLLHVRIPNSYEVSSAPDVPSMGLVSSHRINPGLEYRQHLLLRGPPPGSANPPRLVSSYRLKQPNVPFPPTSNGLSGYKDSSHGIAESAALRPQWCCHCKVVILGSGVRKSFKDLTLLNKDSRESTKRVEKDIVFCSNNCFILYSSTAQAKNSENKESIPSLPQSPMRETPSKAFHQYSNNISTLDVHCLPQLPEKASPPASPPIAFPPAFEAAQVEAKPDELKVTVKLKPRLRAVHGGFEDCRPLNKKWRGMKWKKWSIHIVIPKGTFKPPCEDEIDEFLKKLGTSLKPDPVPKDYRKCCFCHEEGDGLTDGPARLLNLDLDLWVHLNCALWSTEVYETQAGALINVELALRRGLQMKCVFCHKTGATSGCHRFRCTNIYHFTCAIKAQCMFFKDKTMLCPMHKPKGIHEQELSYFAVFRRVYVQRDEVRQIASIVQRGERDHTFRVGSLIFHTIGQLLPQQMQAFHSPKALFPVGYEASRLYWSTRYANRRCRYLCSIEEKDGRPVFVIRIVEQGHEDLVLSDISPKGVWDKILEPVACVRKKSEMLQLFPAYLKGEDLFGLTVSAVARIAESLPGVEACENYTFRYGRNPLMELPLAVNPTGCARSEPKMSAHVKRFVLRPHTLNSTSTSKSFQSTVTGELNAPYSKQFVHSKSSQYRKMKTEWKSNVYLARSRIQGLGLYAARDIEKHTMVIEYIGTIIRNEVANRKEKLYESQNRGVYMFRMDNDHVIDATLTGGPARYINHSCAPNCVAEVVTFERGHKIIISSSRRIQKGEELCYDYKFDFEDDQHKIPCHCGAVNCRKWMN

SEQ ID NO: 109 - protein, 5120 aa, Homo sapiens
MTSRRLEESMGAVQMGLVNMFKGFQSKVLPPLSPKVVTEEEVNRMLTPSEFLKEMSLTTEQRLAKTRLMCRPQIIELLDMGETTHQKFSGIDLDQALFQPFPSEIIFQNYTPCEVYEVPLILRNNDKIPRLVKVVEESSPYFKVISPKDIGHKVAPGVPSIFRILFTPEENKDYAHTLTCVTEREKFIVPIKARGARAILDFPDKLNFSTCPVKYSTQKILLVRNIGNKNAVFHIKTCRPFSIEPAIGTLNVGESMQLEVEFEPQSVGDHSGRLIVCYDTGEKVFVSLYGAAIDMNIRLDKNSLTIEKTYISLANQRTITIHNRSNIIAHFLWKVFATQQEEDREKYRACDDLIKEEKDETDEFFEECITDPLLREHLSVLSRTFANQRRLVQGDSKLFFNNVFTVEPLEGDVWPNSSAEITVYFNPLEAKLYQQTIYCDILGREIRLPLRIKGEGMGPKIHFNFELLDIGKVFTGSAHCYEAILYNKGSIDALFNMTPPTSALGACFVFSPKEGIIEPSGVQAIQISFSSTILGNFEEEFLVNVNGSPEPVKLTIRGCVIGPTFHFNVPALHFGDVSFGFPHTLICSLNNTSLIPMTYKLRIPGDGLGHKSISYCEQHVDYKRPSWTKEEISSMKPKEFTISPDCGTIRPQGFAAIRVTLCSNTVQKYELALVVDVEGIGEEVLALLITARCVVPALHLVNTEVDFGHCFLKYPYEKTLQLANQDDLPGFYEVQPQVCEEVPTVLFSSPTPSGVISPSSTIHIPLVLETQVTGEHRSTVYISIFGSQDPPLVCHLKSAGEGPVIYVHPNQVDFGNIYVLKDSSRILNLCNQSFIPAFFQAHMAHKKSLWTIEPNEGMVPPETDVQLALTANLNDTLTFKDCVILDIENSSTYRIPVQASGTGSTIVSDKPFAPELNLGAHFSLDTHYYHFKLINKGRRIQQLFWMNDSFRPQAKLSKKGRVKKGHAHVQPQPSGSQEPRDPQSPVFHLHPASMELYPGQAIDVILEGYSATPRIVKEKLVCHAIIGAQKGKSLVMAVNITCEFVAPLIQLSTKQLIYRLEKKPNSILKPDYQPLAIKNISTLPVNLLLSTSGPFFICETDKSLLPATPEPIKLEIDEEKNLLIKFDPSYRNDLNNWVAEEILAIKYVEHPQIDSLDLRGEVHYPNLSFETKELDFGCILNDTELIRYVTITNCSPLVVKFRWFFLVNDEENQIRFVTLPKKPYSAPVSQMESIPATSEAASPPAILVTVESPEMDLNDFVKTVLVDEDARPEEKELRKTKASSVISDVRCPFHGEERIYSSQSQVEDQESLQTCEQNEMLSIGIEEVFDILPLFGVLQPHSSHQISFTFYGHANIIAQAKALCEVEEGPTYEITLKGEASLVNYSFDTKDIHYGLQLFDHVTEREITLTNMGKVGFEFKVLTDHQSSPDNLLPGVPLILPVSGFISSHQEQVLKVYYLPGVPEVFKRSFQIQIAHLDPENITLSGEGIFPQICLDLPRNLTANEKYEMFLNQARKNTDKEYNKCEMLDHFDIITEEVPEDEPAEVSAHLQMEVERLIVQSYVLEHQKTTTPDPMDDPCFSHRSRRKLAKIQLPEYILDFGYIILGEVRTHIIKIINTSHFPVSFHADKRVLHETGFSTELDRVKNLPHCETEIFEVRFDPQGANLPVGSKEVILPIKVVGGPTVHICLQAKVTIPTMTLSRGKVDFATIQCGQCLVETIQLSNHLQVPCEWFVQSQKPVDKLEKHMPKYLRQKLRAELKPKTRIFEIQPISGVLDPGEKSNVQVKFMPKEEKFYSQTLVFQIAQSAQKLTLLARGQGLEPRLEFSPSVLDLGPLLLCAPGDEAEVIVKNPCNFPIEFYSLEFDQQYLIEEKILRKLKGYDSYNTLLLPPRNPGEKLPPELYEYFKEIKKSKEEQMRAKYLENLAQENEEEDITSSDQGTSNSTKRTSLSRGISVTSNLEEWHALLVESKTYLEEEEDEESLEKIIFQTDKLQSIDSHSMEEVGEVENNPVSKAIARHLGIDISAEGRLAKNRKGIAIIIHGTPLSGKSANAVSVAKYYNAACLSIDSIVLEAVANSNNIPGIRARELCIRAAIEQSVKEGEEAAQEAAVGQNVIGQGRLSTDTLGKLASEMTLVAPEIKPGKSVRGSVVITKSKADSHGSGSQKQHHSHQSETPQISSSPLPPGPIHRWLSVSPSVGGETGLMSCVLPDELLVQILAERIQLSDCYRGVVFDGLDTLFAQNAAAALLCLLKAIGSREHIYILNMAQDYAAMKAQEKAKKEQEERKHKGALEKEKERLQNMDEEEYDALTEEEKLTFDRGIQQALRERKKREQERLAKEMQEKKLQQELERQKEEDELKRRVKKGKQGPIKEEPPMKKSQAANKQVPPLTKVDVKMETIERKISVREQTMSEKEELNKKKRNMGDVSMHGLPLVQDQEDSEGDNSKDPDKQLAPKFKTYELTLKDVQNILMYWDRKQGVQLPPAGMEEAPHEPDDQRQVPLGGRRGRKDRERERLEKERTEKERLEREKAERERLEKLRALEERSDWEGEGEEDHEGKKEKDLGVPFLDIQTPDFEGLSWKQALESDKLPKGEQILDILGLGASGPPIPPPALFSIVSYPVKRPPLTMTDDLEHFVFVIPPSEDISLDEKKEMEIESDFLATTNTTKAQEEQTSSSKGGKQKMKEKIDQVFEIQKDKRHMALNRKVLSGEPAGTISQLSDTDLDNFNGQHSQEKFTRLNHFRWIVPANGEVTLQVHFSSDEFGNFDQTFNFEILGTCCQYQLYCRGICTYPYICQDPKVVFPQRKMDMKTNEVIFKKYVMSTETYYFGPLLCGKSRDKYKSSLFPGNMETLTILNTSLMVVEASFYFQNDVKANTYFLEPNTMVLKPNEKQILNVWAYPTSVGVFEDSIVCCINDNPEPAIFQLSCQGIRPELELEPRQLHFDRLLLHRQESRVVLLRNVTLLPVAWRITSLEHLGDDFTVSLMQGTIPPEAEYGLHLYFQPTKPVNIKKAIRLEVLDAENLLGVVQIENIMVFAEAYDIALDITFPKGAEGGLDFGIVRVTEEAKQPLQLKNRGKYEIAFSFSVDSVGISTPNINSMISVQPKKGSLTPTEKPTNVQVFFHAKKEVKIEHQPVLRCQIIEPNISEGGEIIASIPIKFSANAVYSKYNITPSSVINFGALICGTRKSTTFTIENQGVTDFKFALYKLTGESPIHQKKAASHVRHARSRESESFYKTGSSRAAKFSDTIQKEVTTTGQARFAHGMFTVYPGFGSIPSGGQQVINVDCVADAMGKCEEFIAIDISGRDPAVHPAGILYTLLAEACLPAFVTENNALIFEEHQICTSANLHHILQTIESGGLFVEDENKFIFCNVLVGRQAKARFKISNVGKITCDVNIVVRPISNKPFARIVDIFEVEPSKMCIASHSHAFATVSFTPQIMQNYQCIFEATLDGLPSTLAKSRGLVFDIAGEGNLPRVTVVRPVLHNQYGNPLLLFKRLLLGHSEKLPLILKNNGVLPAQLHVDLQDELGVFSLKGRPTTAYIYITEENKPHVKAKKAHTASLVVSPGDTAEFDVVFHSQKVGRMRGIIHLSVINNQYEETSIHMVGEGYEDDITLDNIHGLVAPTSQEDISISEFTEIIEDNDMEDLVAAALVDHIQFGDCHIGHSYNASFTVTNHSQVNLIRFEWPVSATIAFSPQMGHLHPGCAKDIVVTMKSDVPINLKNMRIRCKLSRIMFQLPADQVPDWDDRMHTVKWVDVPRNMPGTFTTKRKVIETDPEPAHSVLEENYQELQLQISANVDFASYHCQARDVRFKETLVYQTRVFEFDVINSGRVQLEFSWVSEDTSKAVSFAKPDHQGSAQKDQLSQGTMHTGSTLDSTMDHWAEGSPQPFSVEPSSGIVPVGKIQKFKVKFSPLDIGDFESNLFCQIPNLPPGEQGPVLVAKGRSTLPICHFDLKDSDYISGHQRNPELRGSSGGALDPNTRVIEFTTVGIGGKNLRTFTILNPTNSTYSFCWISEEIESLQNPAAFTCLTEKGFIHPEKKAEIVFQFTPFHLGITESSWTFLIPEHNITVPFLLVGKTTEPLISLNKSHLNFSSLLIGREARETVQIINKEEQGFDFSFQDNSRYSEGFSNSLLVCPMEGWIPPLSRFPIDIFFTPKQEGDVNFNLICNVEKKVHPVTLNVKAEGYTMNVEIKCKDRTGSITLLTPNQTNIINFYEVELNECVQCEFNFINTGKFTFSFQAQLCGSKTLLQYLEFSPIDSTVDVGQSVHATLSFQPLKKCVLTDLELIIKISHGPTFMCNISGCAVSPAIHFSFTSYNFGTCFIYQAGMPPYKQTLVITNKEETPMSIDCLYTNTTHLEVNSRVDVVKPGNTLEIPITFYPRESINYQELIPFEINGLSQQTVEIKGKGTKMKILVLDPANRIVKLGAVLPGQVVKRTVSIMNNSLAQLTFNQSILFTIPELQEPKVLTLAPFHNITLKPKEVCKLEVIFAPKKRVPPFSEEVFMECMGLLRPLFLLSGCCQALEISLDQEHIPFGPVVYQTQATRRILMMNTGDVGARFKWDIKKFEPHFSISPEEGYITSGMEVSFEVTYHPTEVGKESLCKNILCYIQGGSPLSLTLSGVCVGPPAVKEVVNFTCQVRSKHTQTILLSNRTNQTWNLHPIFEGEHWEGPEFITLEAHQQNKPYEITYRPRTMNLENRKHQGTLFFPLPDGTGWLYALHGTSELPKAVANIYREVPCKTPYTELLPITNWLNKPQRFRVIVEILKPEKPDLSITMKGLDYIDVLSGSKKDYKLNFFSHKEGTYAAKVIFRNEVTNEFLYYNVSFRVIPSGIIKTIEMVTPVRQVASASIKLENPLPYSVTFSTECRMPDIALPSQFVVPANSEGTFSFEFQPLKAGETFGRLTLHNTDLGYYQYELYLKATPALPEKPVHFQTVLGSSQIILVKFINYTRQRTEYYCRTDCTDFHAEKLINAAPGGQGGTEASVEVLFEPSHLGETKGILILSSLAGGEYIIPLFGMALPPKPQGPFSIRAGYSIIIPFKNVFYHMVTFSIIVDNPAFTIRAGESVRPKKINNITVSFEGNPSGSKTPITTKLTVSCPPGEGSETGVKWVYYLKGITL

SEQ ID NO: 110 - protein, 113 aa, Homo sapiens
DIVMTQSPLSLPVTPGEPASISCRSSQSLLHSDGFDYLNWYLQKPGQSPZLLIYALSNRASGVPDRFSGSGSGTDFTLKISRVEAEDVGVYYCMZALQAPITFGQGTRLEIKR

SEQ ID NO: 111 - protein, 4646 aa, Homo sapiens [sequence omitted]

SEQ ID NO: 112 - protein, 2639 aa, Homo sapiens
MSSSHSRAGQSAAGAAPGGGVDTRDAEMPATEKDLAEDAPWKKIQQNTFTRWCNEHLKCVSKRIANLQTDLSDGLRLIALLEVLSQKKMHRKHNQRPTFRQMQLENVSVALEFLDRESIKLVSIDSKAIVDGNLKLILGLIWTLILHYSISMPMWDEEEDEEAKKQTPKQRLLGWIQNKLPQLPITNFSRDWQSGRALGALVDSCAPGLCPDWDSWDASKPVTNAREAMQQADDWLGIPQVITPEEIVDPNVDEHSVMTYLSQFPKAKLKPGAPLRPKLNPKKARAYGPGIEPTGNMVKKRAEFTVETRSAGQGEVLVYVEDPAGHQEEAKVTANNDKNRTFSVWYVPEVTGTHKVTVLFAGQHIAKSPFEVYVDKSQGDASKVTAQGPGLEPSGNIANKTTYFEIFTAGAGTGEVEVVIQDPMGQKGTVEPQLEARGDSTYRCSYQPTMEGVHTVHVTFAGVPIPRSPYTVTVGQACNPSACRAVGRGLQPKGVRVKETADFKVYTKGAGSGELKVTVKGPKGEERVKQKDLGDGVYGFEYYPMVPGTYIVTITWGGQNIGRSPFEVKVGTECGNQKVRAWGPGLEGGVVGKSADFVVEAIGDDVGTLGFSVEGPSQAKIECDDKGDGSCDVRYWPQEAGEYAVHVLCNSEDIRLSPFMADIRDAPQDFHPDRVKARGPGLEKTGVAVNKPAEFTVDAKHGGKAPLRVQVQDNEGCPVEALVKDNGNGTYSCSYVPRKPVKHTAMVSWGGVSIPNSPFRVNVGAGSHPNKVKVYGPGVAKTGLKAHEPTYFTVDCAEAGQGDVSIGIKCAPGVVGPAEADIDFDIIRNDNDTFTVKYTPRGAGSYTIMVLFADQATPTSPIRVKVEPSHDASKVKAEGPGLSRTGVELGKPTHFTVNAKAAGKGKLDVQFSGLTKGDAVRDVDIIDHHDNTYTVKYTPVQQGPVGVNVTYGGDPIPKSPFSVAVSPSLDLSKIKVSGLGEKVDVGKDQEFTVKSKGAGGQGKVASKIVGPSGAAVPCKVEPGLGADNSVVRFLPREEGPYEVEVTYDGVPVPGSPFPLEAVAPTKPSKVKAFGPGLQGGSAGSPARFTIDTKGAGTGGLGLTVEGPCEAQLECLDNGDGTCSVSYVPTEPGDYNINILFADTHIPGSPFKAHVVPCFDASKVKCSGPGLERATAGEVGQFQVDCSSAGSAELTIEICSEAGLPAEVYIQDHGDGTHTITYIPLCPGAYTVTIKYGGQPVPNFPSKLQVEPAVDTSGVQCYGPGIEGQGVFREATTEFSVDARALTQTGGPHVKARVANPSGNLTETYVQDRGDGMYKVEYTPYEEGLHSVDVTYDGSPVPSSPFQVPVTEGCDPSRVRVHGPGIQSGTTNKPNKFTVETRGAGTGGLGLAVEGPSEAKMSCMDNKDGSCSVEYIPYEAGTYSLNVTYGGHQVPGSPFKVPVHDVTDASKVKCSGPGLSPGMVRANLPQSFQVDTSKAGVAPLQVKVQGPKGLVEPVDVVDNADGTQTVNYVPSREGPYSISVLYGDEEVPRSPFKVKVLPTHDASKVKASGPGLNTTGVPASLPVEFTIDAKDAGEGLLAVQITDPEGKPKKTHIQDNHDGTYTVAYVPDVTGRYTILIKYGGDEIPFSPYRVRAVPTGDASKCTVTGAGIGPTIQIGEETVITVDTKAAGKGKVTCTVCTPDGSEVDVDVVENEDGTFDIFYTAPQPGKYVICVRFGGEHVPNSPFQVTALAGDQPSVQPPLRSQQLAPQYTYAQGGQQTWAPERPLVGVNGLDVTSLRPFDLVIPFTIKKGEITGEVRMPSGKVAQPTITDNKDGTVTVRYAPSEAGLHEMDIRYDNMHIPGSPLQFYVDYVNCGHVTAYGPGLTHGVVNKPATFTVNTKDAGEGGLSLAIEGPSKAEISCTDNQDGTCSVSYLPVLPGDYSILVKYNEQHVPGSPFTARVTGDDSMRMSHLKVGSAADIPINISETDLSLLTATVVPPSGREEPCLLKRLRNGHVGISFVPKETGEHLVHVKKNGQHVASSPIPVVISQSEIGDASRVRVSGQGLHEGHTFEPAEFIIDTRDAGYGGLSLSIEGPSKVDINTEDLEDGTCRVTYCPTEPGNYIINIKFADQHVPGSPFSVKVTGEGRVKESITRRRRAPSVANVGSHCDLSLKIPEISIQDMTAQVTSPSGKTHEAEIVEGENHTYCIRFVPAEMGTHTVSVKYKGQHVPGSPFQFTVGPLGEGGAHKVRAGGPGLERAEAGVPAEFSIWTREAGAGGLAIAVEGPSKAEISFEDRKDGSCGVAYVVQEPGDYEVSVKFNEEHIPDSPFVVPVASPSGDARRLTVSSLQESGLKVNQPASFAVSLNGAKGAIDAKVHSPSGALEECYVTEIDQDKYAVRFIPRENGVYLIDVKFNGTHIPGSPFKIRVGEPGHGGDPGLVSAYGAGLEGGVTGNPAEFVVNTSNAGAGALSVTIDGPSKVKMDCQECPEGYRVTYTPMAPGSYLISIKYGGPYHIGGSPFKAKVTGPRLVSNHSLHETSSVFVDSLTKATCAPQHGAPGPGPADASKVVAKGLGLSKAYVGQKSSFTVDCSKAGNNMLLVGVHGPRTPCEEILVKHVGSRLYSVSYLLKDKGEYTLVVKWGDEHIPGSPYRVVVP

SEQ ID NO: 113 - protein, 3224 aa, Homo sapiens
MRRSKADVERYIASVQGSTPSPRQKSMKGFYFAKLYYEAKEYDLAKKYICTYINVQERDPKAHRFLGLLYELEENTDKAVECYRRSVELNPTQKDLVLKIAELLCKNDVTDGRAKYWLERAAKLFPGSPAIYKLKEQLLDCEGEDGWNKLFDLIQSELYVRPDDVHVNIRLVEVYRSTKRLKDAVAHCHEAERNIALRSSLEWNSCVVQTLKEYLESLQCLESDKSDWRATNTDLLLAYANLMLLTLSTRDVQESRELLQSFDSALQSVKSLGGNDELSATFLEMKGHFYMHAGSLLLKMGQHSSNVQWRALSELAALCYLIAFQVPRPKIKLIKGEAGQNLLEMMACDRLSQSGHMLLNLSRGKQDFLKEIVETFANKSGQSALYDALFSSQSPKDTSFLGSDDIGNIDVREPELEDLTRYDVGAIRAHNGSLQHLTWLGLQWNSLPALPGIRKWLKQLFHHLPHETSRLETNAPESICILDLEVFLLGVVYTSHLQLKEKCNSHHSSYQPLCLPLPVCKQLCTERQKSWWDAVCTLIHRKAVPGNVAKLRLLVQHEINTLRAQEKHGLQPALLVHWAECLQKTGSGLNSFYDQREYIGRSVHYWKKVLPLLKIIKKKNSIPEPIDPLFKHFHSVDIQASEIVEYEEDAHITFAILDAVNGNIEDAVTAFESIKSVVSYWNLALIFHRKAEDIENDALSPEEQEECKNYLRKTRDYLIKIIDDSDSNLSVVKKLPVPLESVKEMLNSVMQELEDYSEGGPLYKNGSLRNADSEIKHSTPSPTRYSLSPSKSYKYSPKTPPRWAEDQNSLLKMICQQVEAIKKEMQELKLNSSNSASPHRWPTENYGPDSVPDGYQGSQTFHGAPLTVATTGPSVYYSQSPAYNSQYLLRPAANVTPTKGPVYGMNRLPPQQHIYAYPQQMHTPPVQSSSACMFSQEMYGPPALRFESPATGILSPRGDDYFNYNVQQTSTNPPLPEPGYFTKPPIAAHASRSAESKTIEFGKTNFVQPMPGEGLRPSLPTQAHTTQPTPFKFNSNFKSNDGDFTFSSPQVVTQPPPAAYSNSESLLGLLTSDKPLQGDGYSGAKPIPGGQTIGPRNTFNFGSKNVSGISFTENMGSSQQKNSGFRRSDDMFTFHGPGKSVFGTPTLETANKNHETDGGSAHGDDDDDGPHFEPVVPLPDKIEVKTGEEDEEEFFCNRAKLFRFDVESKEWKERGIGNVKILRHKTSGKIRLLMRREQVLKICANHYISPDMKLTPNAGSDRSFVWHALDYADELPKPEQLAIRFKTPEEAALFKCKFEEAQSILKAPGTNVAMASNQAVRIVKEPTSHDNKDICKSDAGNLNFEFQVAKKEGSWWHCNSCSLKNASTAKKCVSCQNLNPSNKELVGPPLAETVFTPKTSPENVQDRFALVTPKKEGHWDCSICLVRNEPTVSRCIACQNTKSANKSGSSFVHQASFKFGQGDLPKPINSDFRSVFSTKEGQWDCSACLVQNEGSSTKCAACQNPRKQSLPATSIPTPASFKFGTSETSKTLKSGFEDMFAKKEGQWDCSSCLVRNEANATRCVACQNPDKPSPSTSVPAPASFKFGTSETSKAPKSGFEGMFTKKEGQWDCSVCLVRNEASATKCIACQNPGKQNQTTSAVSTPASSETSKAPKSGFEGMFTKKEGQWDCSVCLVRNEASATKCIACQNPGKQNQTTSAVSTPASSETSKAPKSGFEGMFTKKEGQWDCSVCLVRNEASATKCIACQCPSKQNQTTAISTPASSEISKAPKSGFEGMFIRKGQWDCSVCCVQNESSSLKCVACDASKPTHKPIAEAPSAFTLGSEMKLHDSSGSQVGTGFKSNFSEKASKFGNTEQGFKFGHVDQENSPSFMFQGSSNTEFKSTKEGFSIPVSADGFKFGISEPGNQEKKSEKPLENGTGFQAQDISGQKNGRGVIFGQTSSTFTFADLAKSTSGEGFQFGKKDPNFKGFSGAGEKLFSSQYGKMANKANTSGDFEKDDDAYKTEDSDDIHFEPVVQMPEKVELVTGEEDEKVLYSQRVKLFRFDAEVSQWKERGLGNLKILKNEVNGKLRMLMRREQVLKVCANHWITTTMNLKPLSGSDRAWMWLASDFSDGDAKLEQLAAKFKTPELAEEFKQKFEECQRLLLDIPLQTPHKLVDTGRAAKLIQRAEEMKSGLKDFKTFLTNDQTKVTEEENKGSGTGAAGASDTTIKPNPENTGPTLEWDNYDLREDALDDSVSSSSVHASPLASSPVRKNLFRFGESTTGFNFSFKSALSPSKSPAKLNQSGTSVGTDEESDVTQEEERDGQYFEPVVPLPDLVEVSSGEENEQVVFSHRAKLYRYDKDVGQWKERGIGDIKILQNYDNKQVRIVMRRDQVLKLCANHRITPDMTLQNMKGTERVWLWTACDFADGERKVEHLAVRFKLQDVADSFKKIFDEAKTAQEKDSLITPHVSRSSTPRESPCGKIAVAVLEETTRERTDVIQGDDVADATSEVEVSSTSETTPKAVVSPPKFVFGSESVKSIFSSEKSKPFAFGNSSATGSLFGFSFNAPLKSNNSETSSVAQSGSESKVEPKKCELSKNSDIEQSSDSKVKNLFASFPTEESSINYTFKTPEKAKEKKKPEDSPSDDDVLIVYELTPTAEQKALATKLKLPPTFFCYKNRPDYVSEEEEDDEDFETAVKKLNGKLYLDGSEKCRPLEENTADNEKECIIVWEKKPTVEEKAKADTLKLPPTFFCGVCSDTDEDNGNGEDFQSELQKVQEAQKSQTEEITSTTDSVYTGGTEVMVPSFCKSEEPDSITKSISSPSVSSETMDKPVDLSTRKEIDTDSTSQGESKIVSFGFGSSTGLSFADLASSNSGDFAFGSKDKNFQWANTGAAVFGTQSVGTQSAGKVGEDEDGSDEEVVHNEDIHFEPIVSLPEVEVKSGEEDEEILFKERAKLYRWDRDVSQWKERGVGDIKILWHTMKNYYRILMRRDQVFKVCANHVITKTMELKPLNVSNNALVWTASDYADGEAKVEQLAVRFKTKEVADCFKKTFEECQQNLMKLQKGHVSLAAELSKETNPVVFFDVCADGEPLGRITMELFSNIVPRTAENFRALCTGEKGFGFKNSIFHRVIPDFVCQGGDITKHDGTGGQSIYGDKFEDENFDVKHTGPGLLSMANQGQNTNNSQFVITLKKAEHLDFKHVVFGFVKDGMDTVKKIESFGSPKGSVCRRITITECGQI

SEQ ID NO: 114 - protein, 5058 aa, Homo sapiens
MGHAGCQFKALLWKNWLCRLRNPVLFLAEFFWPCILFVILTVLRFQEPPRYRDICYLQPRDLPSCGVIPFVQSLLCNTGSRCRNFSYEGSMEHHFRLSRFQTAADPKKVNNLAFLKEIQDLAEEIHGMMDKAKNLKRLWVERSNTPDSSYGSSFFTMDLNKTEEVILKLESLHQQPHIWDFLLLLPRLHTSHDHVEDGMDVAVNLLQTILNSLISLEDLDWLPLNQTFSQVSELVLNVTISTLTFLQQHGVAVTEPVYHLSMQNIVWDPQKVQYDLKSQFGFDDLHTEQILNSSAELKEIPTDTSLEKMVCSVLSSTSEDEAEKWGHVGGCHPKWSEAKNYLVHAVSWLRVYQQVFVQWQQGSLLQKTLTGMGHSLEALRNQFEEESKPWKVVEALHTALLLLNDSLSADGPKDNHTFPKILQHLWKLQSLLQNLPQWPALKRFLQLDGALRNAIAQNLHFVQEVLICLETSANDFKWFELNQLKLEKDVFFWELKQMLAKNAVCPNGRFSEKEVFLPPGNSSIWGGLQGLLCYCNSSETSVLNKLLGSVEDADRILQEVITWHKNMSVLIPEEYLDWQELEMQLSEASLSCTRLFLLLGADPSPENDVFSSDCKHQLVSTVIFHTLEKTQFFLEQAYYWKAFKKFIRKTCEVAQYVNMQESFQNRLLAFPEESPCFEENMDWKMISDNYFQFLNNLLKSPTASISRALNFTKHLLMMEKKLHTLEDEQMNFLLSFVEFFEKLLLPNLFDSSIVPSFHSLPSLTEDILNISSLWTNHLKSLKRDPSATDAQKLLEFGNEVIWKMQTLGSHWIRKEPKNLLRFIELILFEINPKLLELWAYGISKGKRAKLENFFTLLNFSVPENEILSTSFNFSQLFHSDWPKSPAMNIDFVRLSEAIITSLHEFGFLEQEQISEALNTVYAIRNASDLFSALSEPQKQEVDKILTHIHLNVFQDKDSALLLQIYSSFYRYIYELLNIQSRGSSLTFLTQISKHILDIIKQFNFQNISKAFAFLFKTAEVLGGISNVSYCQQLLSIFNFLELQAQSFMSTEGQELEVIHTTLTGLKQLLIIDEDFRISLFQYMSQFFNSSVEDLLDNKCLISDNKHISSVNYSTSEESSFVFPLAQIFSNLSANVSVFNKFMSIHCTVSWLQMWTEIWETISQLFKFDMNVFTSLHHGFTQLLDELEDDVKVSKSCQGILPTHNVARLILNLFKNVTQANDFHNWEDFLDLRDFLVALGNALVSVKKLNLEQVEKSLFTMEAALHQLKTFPFNESTSREFLNSLLEVFIEFSSTSEYIVRNLDSINDFLSNNLTNYGEKFENIITELREAIVFLRNVSHDRDLFSCADIFQNVTECILEDGFLYVNTSQRMLRILDTLNSTFSSENTISSLKGCIVWLDVINHLYLLSNSSFSQGHLQNILGNFRDIENKMNSILKIVTWVLNIKKPLCSSNGSHINCVNIYLKDVTDFLNIVLTTVFEKEKKPKFEILLALLNDSTKQVRMSINNLTTDFDFASQSNWRYFTELILRPIEMSDEIPNQFQNIWLHLITLGKEFQKLVKGIYFNILENNSSSKTENLLNIFATSPKEKDVNSVGNSIYHLASYLAFSLSHDLQNSPKIIISPEIMKATGLGIQLIRDVFNSLMPVVHHTSPQNAGYMQALKKVTSVMRTLKKADIDLLVDQLEQVSVNLMDFFKNISSVGTGNLVVNLLVGLMEKFADSSHSWNVNHLLQLSRLFPKDVVDAVIDVYYVLPHAVRLLQGVPGKNITEGLKDVYSFTLLHGITISNITKEDFAIVIKILLDTIELVSDKPDIISEALACFPVVWCWNHTNSGFRQNSKIDPCNVHGLMSSSFYGKVASILDHFHLSPQGEDSPCSNESSRMEITRKVVCIIHELVDWNSILLELSEVFHVNISLVKTVQKFWHKILPFVPPSINQTRDSISELCPSGSIKQVALQIIEKLKNVNFTKVTSGENILDKLSSLNKILNINEDTETSVQNIISSNLERTVQLISEDWSLEKSTHNLLSLFMMLQNANVTGSSLEALSSFIEKSETPYNFEELWPKFQQIMKDLTQDFRIRHLLSEMNKGIKSINSMALQKITLQFAHFLEILDSPSLKTLEIIEDFLLVTKNWLQEYANEDYSRMIETLFIPVTNESSTEDIALLAKAIATFWGSLKNISRAGNFDVAFLTHLLNQEQLTNFSVVQLLFENILINLINNLAGNSQEAAWNLNDTDLQIMNFINLILNHMQSETSRKTVLSLRSIVDFTEQFLKTFFSLFLKEDSENKISLLLKYFHKDVIAEMSFVPKDKILEILKLDQFLTLMIQDRLMNIFSSLKETIYHLMKSSFILDNGEFYFDTHQGLKFMQDLFNALLRETSMKNKTENNIDFFTVVSQLFFHVNKSEDLFKLNQDLGSALHLVRECSTEMARLLDTILHSPNKDFYALYPTLQEVILANLTDLLFFINNSFPLRNRATLEITKRLVGAISRASEESHVLKPLLEMSGTLVMLLNDSADLRDLATSMDSIVKLLKLVKKVSGKMSTVFKTHFISNTKDSVKFFDTLYSIMQQSVQNLVKEIATLKKIDHFTFEKINDLLVPFLDLAFEMIGVEPYISSNSDIFSMSPSILSYMNQSKDFSDILEEIAEFLTSVKMNLEDMRSLAVAFNNETQTFSMDSVNLREEILGCLVPINNITNQMDFLYPNPISTHSGPQDIKWEIIHEVIPFLDKILSQNSTEIGSFLKMVICLTLEALWKNLKKDNWNVSNVLMTFTQHPNNLLKTIETVLEASSGIKSDYEGDLNKSLYFDTPLSQNITHHQLEKAIHNVLSRIALWRKGLLFNNSEWITSTRTLFQPLFEIFIKATTGKNVTSEKEERTKKEMIDFPYSFKPFFCLEKYLGGLFVLTKYWQQIPLTDQSVVEICEVFQQTVKPSEAMEMLQKVKMMVVRVLTIVAENPSWTKDILCATLSCKQNGIRHLILSAIQGVTLAQDHFQEIEKIWSSPNQLNCESLSKNLSSTLESFKSSLENATGQDCTSQPRLETVQQHLYMLAKSLEETWSSGNPIMTFLSNFTVTEDVKIKDLMKNITKLTEELRSSIQISNETIHSILEANISHSKVLFSALTVALSGKCDQEILHLLLTFPKGEKSWIAAEELCSLPGSKVYSLIVLLSRNLDVRAFIYKTLMPSEANGLLNSLLDIVSSLSALLAKAQHVFEYLPEFLHTFKITALLETLDFQQVSQNVQARSSAFGSFQFVMKMVCKDQASFLSDSNMFINLPRVKELLEDDKEKFNIPEDSTPFCLKLYQEILQLPNGALVWTFLKPILHGKILYTPNTPEINKVIQKANYTFYIVDKLKTLSETLLEMSSLFQRSGSGQMFNQLQEALRNKFVRNFVENQLHIDVDKLTEKLQTYGGLLDEMFNHAGAGRFRFLGSILVNLSSCVALNRFQALQSVDILETKAHELLQQNSFLASIIFSNSLFDKNFRSESVKLPPHVSYTIRTNVLYSVRTDVVKNPSWKFHPQNLPADGFKYNYVFAPLQDMIERAIILVQTGQEALEPAAQTQAAPYPCHTSDLFLNNVGFFFPLIMMLTWMVSVASMVRKLVYEQEIQIEEYMRMMGVHPVIHFLAWFLENMAVLTISSATLAIVLKTSGIFAHSNTFIVFLFLLDFGMSVVMLSYLLSAFFSQANTAALCTSLVYMISFLPYIVLLVLHNQLSFVNQTFLCLLSTTAFGQGVFFITFLEGQETGIQWNNMYQALEQGGMTFGWVCWMILFDSSLYFLCGWYLSNLIPGTFGLRKPWYFPFTASYWKSVGFLVEKRQYFLSSSLFFFNENFDNKGSSLQNREGELEGSAPGVTLVSVTKEYEGHKAVVQDLSLTFYRDQITALLGTNGAGKTTIISMLTGLHPPTSGTIIINGKNLQTDLSRVRMELGVCPQQDILLDNLTVREHLLLFASIKAPQWTKKELHQQVNQTLQDVDLTQHQHKQTRALSGGLKRKLSLGIAFMGMSRTVVLDEPTSGVDPCSRHSLWDILLKYREGRTIIFTTHHLDEAEALSDRVAVLQHGRLRCCGPPFCLKEAYGQGLRLTLTRQPSVLEAHDLKDMACVTSLIKIYIPQAFLKDSSGSELTYTIPKDTDKACLKGLFQALDENLHQLHLTGYGISDTTLEEVFLMLLQDSNKKSHIALGTESELQNHRPTGHLSGYCGSLARPATVQGVQLLRAQVAAILARRLRRTLRAGKSTLADLLLPVLFVALAMGLFMVRPLATEYPPLRLTPGHYQRAETYFFSSGGDNLDLTRVLLRKFRDQDLPCADLNPRQKNSSCWRTDPFSHPEFQDSCGCLKCPNRSASAPYLTNHLGHTLLNLSGFNMEEYLLAPSEKPRLGGWSFGLKIPSEAGGANGNISKPPTLAKVWYNQKGFHSLPSYLNHLNNLILWQHLPPTVDWRQYGITLYSHPYGGALLNKDKILESIRQCGVALCIVLGFSILSASIGSSVVRDRVIGAKRLQHISGLGYRMYWFTNFLYDMLFYLVSVCLCVAVIVAFQLTAFTFRKNLAATALLLSLFGYATLPWMYLMSRIFSSSDVAFISYVSLNFIFGLCTMLITIMPRLLAIISKAKNLQNIYDVLKWVFTIFPQFCLGQGLVELCYNQIKYDLTHNFGIDSYVSPFEMNFLGWIFVQLASQGTVLLLLRVLLHWDLLRWPRGHSTLQGTVKSSKDTDVEKEEKRVFEGRTNGDILVLYNLSKHYRRFFQNIIAVQDISLGIPKGECFGLLGVNGAGKSTTFKMLNGEVSLTSGHAIIRTPMGDAVDLSSAGTAGVLIGYCPQQDALDELLTGWEHLYYYCSLRGIPRQCIPEVAGDLIRRLHLEAHADKPVATYSGGTKRKLSTALALVGKPDILLLDEPSSGMDPCSKRYLWQTIMKEVREGCAAVLTSHSMEECEALCTRLAIMVNGSFKCLGSPQHIKNRFGDGYTVKVWLCKEANQHCTVSDHLKLYFPGIQFKGQHLNLLEYHVPKRWGCLADLFKVIENNKTFLNIKHYSINQTTLEQVFINFASEQQQTLQSTLDPSTDSHHTHHLPI

SEQ ID NO: 115 - protein, 5142 aa, Homo sapiens
MGNEASLEGEGLPEGLAAAAAAGGGASGAGSPSHTAIPAGMEADLSQLSEEERRQIAAVMSRAQGLPKGSVPPAAAESPSMHRKQELDSSHPPKQSGRPPDPGRPAQPGLSKSRTTDTFRSEQKLPGRSPSTISLKESKSRTDLKEEHKSSMMPGFLSEVNALSAVSSVVNKFNPFDLISDSEASQEETTKKQKVVQKEQGKPEGIIKPPLQQQPPKPIPKQQGPGRDPLQQDGTPKSISSQQPEKIKSQPPGTGKPIQGPTQTPQTDHAKLPLQRDASRPQTKQADIVRGESVKPSLPSPSKPPIQQPTPGKPPAQQPGHEKSQPGPAKPPAQPSGLTKPLAQQPGTVKPPVQPPGTTKPPAQPLGPAKPPAQQTGSEKPSSEQPGPKALAQPPGVGKTPAQQPGPAKPPTQQVGTPKPLAQQPGLQSPAKAPGPTKTPVQQPGPGKIPAQQAGPGKTSAQQTGPTKPPSQLPGPAKPPPQQPGPAKPPPQQPGSAKPPSQQPGSTKPPPQQPGPAKPSPQQPGSTKPPSQQPGSAKPSAQQPSPAKPSAQQSTKPVSQTGSGKPLQPPTVSPSAKQPPSQGLPKTICPLCNTTELLLHVPEKANFNTCTECQTTVCSLCGFNPNPHLTEVKEWLCLNCQMKRALGGDLAPVPSSPQPKLKTAPVTTTSAVSKSSPQPQQTSPKKDAAPKQDLSKAPEPKKPPPLVKQPTLHGSPSAKAKQPPEADSLSKPAPPKEPSVPSEQDKAPVADDKPKQPKMVKPTTDLVSSSSATTKPDIPSSKVQSQAEEKTTPPLKTDSAKPSQSFPPTGEKVSPFDSKAIPRPASDSKIISHPGPSSESKGQKQVDPVQKKEEPKKAQTKMSPKPDAKPMPKGSPTPPGPRPTAGQTVPTPQQSPKPQEQSRRFSLNLGSITDAPKSQPTTPQETVTGKLFGFGASIFSQASNLISTAGQPGPHSQSGPGAPMKQAPAPSQPPTSQGPPKSTGQAPPAPAKSIPVKKETKAPAAEKLEPKAEQAPTVKRTETEKKPPPIKDSKSLTAEPQKAVLPTKLEKSPKPESTCPLCKTELNIGSKDPPNFNTCTECKNQVCNLCGFNPTPHLTEIQEWLCLNCQTQRAISGQLGDIRKMPPAPSGPKASPMPVPTESSSQKTAVPPQVKLVKKQEQEVKTEAEKVILEKVKETLSMEKIPPMVTTDQKQEESKLEKDKASALQEKKPLPEEKKLIPEEEKIRSEEKKPLLEEKKPTPEDKKLLPEAKTSAPEEQKHDLLKSQVQIAEEKLEGRVAPKTVQEGKQPQTKMEGLPSGTPQSLPKEDDKTTKTIKEQPQPPCTAKPDQVEPGKEKTEKEDDKSDTSSSQQPKSPQGLSDTGYSSDGISSSLGEIPSLIPTDEKDILKGLKKDSFSQESSPSSPSDLAKLESTVLSILEAQASTLADEKSEKKTQPHEVSPEQPKDQEKTQSLSETLEITISEEEIKESQEERKDTFKKDSQQDIPSSKDHKEKSEFVDDITTRREPYDSVEESSESENSPVPQRKRRTSVGSSSSDEYKQEDSQGSGEEEDFIRKQIIEMSADEDASGSEDDEFIRNQLKEISSSTESQKKEETKGKGKITAGKHRRLTRKSSTSIDEDAGRRHSWHDEDDEAFDESPELKYRETKSQESEELVVTGGGGLRRFKTIELNSTIADKYSAESSQKKTSLYFDEEPELEMESLTDSPEDRSRGEGSSSLHASSFTPGTSPTSVSSLDEDSDSSPSHKKGESKQQRKARHRPHGPLLPTIEDSSEEEELREEEELLKEQEKQREIEQQQRKSSSKKSKKDKDELRAQRRRERPKTPPSNLSPIEDASPTEELRQAAEMEELHRSSCSEYSPSIESDPEGFEISPEKIIEVQKVYKLPTAVSLYSPTDEQSIMQKEGSQKALKSAEEMYEEMMHKTHKYKAFPAANERDEVFEKEPLYGGMLIEDYIYESLVEDTYNGSVDGSLLTRQEEENGFMQQKGREQKIRLSEQIYEDPMQKITDLQKEFYELESLHSVVPQEDIVSSSFIIPESHEIVDLGTMVTSTEEERKLLDADAAYEELMKRQQMQLTPGSSPTQAPIGEDMTESTMDFDRMPDASLTSSVLSGASLTDSTSSATLSIPDVKITQHFSTEEIEDEYVTDYTREIQEIIAHESLILTYSEPSESATSVPPSDTPSLTSSVSSVCTTDSSSPITTLDSITTVYTEPVDMITKFEDSEEISSSTYFPGSIIDYPEEISVSLDRTAPPDGRASADHIVISLSDMASSIIESVVPKPEGPVADTVSTDLLISEKDPVKKAKKETGNGIILEVLEAYRDKKELEAERTKSSLSETVFDHPPSSVIALPMKEQLSTTYFTSGETFGQEKPASQLPSGSPSVSSLPAKPRPFFRSSSLDISAQPPPPPPPPPPPPPPPPPPPPPPLPPPTSPKPTILPKKKLTVASPVTTATPLFDAVTTLETTAVLRSNGLPVTRICTTAPPPVPPKPSSIPSGLVFTHRPEPSKPPIAPKPVIPQLPTTTQKPTDIHPKPTGLSLTSSMTLNLVTSADYKLPSPTSPLSPHSNKSSPRFSKSLTETYVVITLPSEPGTPTDSSASQAITSWPLGSPSKDLVSVEPVFSVVPPVTAVEIPISSEQTFYISGALQTFSATPVTAPSSFQAAPTSVTQFLTTEVSKTEVSATRSTAPSVGLSSISITIPPEPLALDNIHLEKPQYKEDGKLQLVGDVIDLRTVPKVEVKTTDKCIDLSASTMDVKRQITANEVYGKQISAVQPSIINLSVTSSIVTPVSLATETVTFVTCTASASYTTGTESLVGAEHAMTTPLQLTTSKHAEPPYRIPSDQVFPIAREEAPINLSLGTPAHAVTLAITKPVTVPPVGVTNGWTDSTVSQGITDGEVVDLSTTKSHRTVVTMDESTSSVMTKIIEDEKPVDLTAGRRAVCCDVVYKLPFGRSCTAQQPATTLPEDRFGYRDDHYQYDRSGPYGYRGIGGMKPSMSDTNLAEAGHFFYKSKNAFDYSEGTDTAVDLTSGRVTTGEVMDYSSKTTGPYPETRQVISGAGISTPQYSTARMTPPPGPQYCVGSVLRSSNGVVYSSVATPTPSTFAITTQPGSIFSTTVRDLSGIHTADAVTSLPAMHHSQPMPRSYFITTGASETDIAVTGIDISASLQTITMESLTAETIDSVPTLTTASEVFPEVVGDESALLIVPEEDKQQQQLDLERELLELEKIKQQRFAEELEWERQEIQRFREQEKIMVQKKLEELQSMKQHLLFQQEEERQAQFMMRQETLAQQQLQLEQIQQLQQQLHQQLEEQKIRQIYQYNYDPSGTASPQTTTEQAILEGQYAALEGSQFWATEDATTTASAVVAIEIPQSQGWYTVQSDGVTQYIAPPGILSTVSEIPLTDVVVKEEKQPKKRSSGAKVRGQYDDMGENMTDDPRSFKKIVDSGVQTDDEDATDRSYVSRRRRTKKSVDTSVQTDDEDQDEWDMPTRSRRKARVGKYGDSMTEADKTKPLSKVSSIAVQTVAEISVQTEPVGTIRTPSIRARVDAKVEIIKHISAPEKTYKGGSLGCQTEADSDTQSPQYLSATSPPKDKKRPTPLEIGYSSHLRADSTVQLAPSPPKSPKVLYSPISPLSPGKALESAFVPYEKPLPDDISPQKVLHPDMAKVPPASPKTAKMMQRSMSDPKPLSPTADESSRAPFQYTEGYTTKGSQTMTSSGAQKKVKRTLPNPPPEEISTGTQSTFSTMGTVSRRRICRTNTMARAKILQDIDRELDLVERESAKLRKKQAELDEEEKEIDAKLRYLEMGINRRKEALLKEREKRERAYLQGVAEDRDYMSDSEVSSTRPTRIESQHGIERPRTAPQTEFSQFIPPQTQTESQLVPPTSPYTQYQYSSPALPTQAPTSYTQQSHFEQQTLYHQQVSPYQTQPTFQAVATMSFTPQVQPTPTPQPSYQLPSQMMVIQQKPRQTTLYLEPKITSNYEVIRNQPLMIAPVSTDNTFAVSHLGSKYNSLDLRIGLEERSSMASSPISSISADSFYADIDHHTPRNYVLIDDIGEITKGTAALSTAFSLHEKDLSKTDRLLRTTETRRSQEVTDFLAPLQSSSRLHSYVKAEEDPMEDPYELKLLKHQIKQEFRRGTESLDHLAGLSHYYHADTSYRHFPKSEKYSISRLTLEKQAAKQLPAAILYQKQSKHKKSLIDPKMSKFSPIQESRDLEPDYSSYMTSSTSSIGGISSRARLLQDDITFGLRKNITDQQKFMGSSLGTGLGTLGNTIRSALQDEADKPYSSGSRSRPSSRPSSVYGLDLSIKRDSSSSSLRLKAQEAEALDVSFSHASSSARTKPTSLPISQSRGRIPIVAQNSEEESPLSPVGQPMGMARAAAGPLPPISADTRDQFGSSHSLPEVQQHMREESRTRGYDRDIAFIMDDFQHAMSDSEAYHLRREETDWFDKPRESRLENGHGLDRKLPERLVHSRPLSQHQEQIIQMNGKTMHYIFPHARIKITRDSKDHTVSGNGLGIRIVGGKEIPGHSGEIGAYIAKILPGGSAEQTGKLMEGMQVLEWNGIPLTSKTYEEVQSIISQQSGEAEICVRLDLNMLSDSENSQHLELHEPPKAVDKAKSPGVDPKQLAAELQKVSLQQSPLVLSSVVEKGSHVHSGPTSAGSSSVPSPGQPGSPSVSKKKHGSSKPTDGTKVVSHPITGEIQLQINYDLGNLIIHILQARNLVPRDNNGYSDPFVKVYLLPGRGQVMVVQNASAEYKRRTKHVQKSLNPEWNQTVIYKSISMEQLKKKTLEVTVWDYDRFSSNDFLGEVLIDLSSTSHLDNTPRWYPLKEQTESIDHGKSHSSQSSQQSPKPSVIKSRSHGIFPDPSKDMQVPTIEKSHSSPGSSKSSSEGHLRSHGPSRSQSKTSVTQTHLEDAGAAIAAAEAAVQQLRIQPTKPPNHRPAESSVSTGSSGSSFGSGYSVDSEGSSSTAGETNLFPIPRIGKMGQNGQEPVKQPGVGVGLADTEAKTQVMGEIKIALKKEMKTDGEQLIVEILQCRNITYKFKSPDHLPDLYVKIYVMNISTQKKVIKKKTRVCRHDREPSFNETFRFSLSPAGHSLQILLFSNGGKFMKKTLIGEACIWLDKVDLRKRIVNWHKLLVSPTQTH

SEQ ID NO: 116 - protein, 2671 aa, Homo sapiens
MAADTQVSETLKRFAGKVTTASVKERREILSELGKCVAGKDLPEGAVKGLCKLFCLTLHRYRDAASRRALQAAIQQLAEAQPEATAKNLLHSLQSSGIGSKAGVPSKSSGSAALLALTWTCLLVRIVFPSRAKRQGDIWNKLVEVQCLLLLEVLGGSHKHAVDGAVKKLTKLWKENPGLVEQYLSAILSLEPNQNYAGMLGLLVQFCTSHKEMDVVSQHKSALLDFYMKNILMSKVKPPKYLLDSCAPLLRYLSHSEFKDLILPTIQKSLLRSPENVIETISSLLASVTLDLSQYAMDIVKGLAGHLKSNSPRLMDEAVLALRNLARQCSDSSAMESLTKHLFAILGGSEGKLTVVAQKMSVLSGIGSVSHHVVSGPSSQVLNGIVAELFIPFLQQEVHEGTLVHAVSVLALWCNRFTMEVPKKLTEWFKKAFSLKTSTSAVRHAYLQCMLASYRGDTLLQALDLLPLLIQTVEKAASQSTQVPTITEGVAAALLLLKLSVADSQAEAKLSSFWQLIVDEKKQVFTSEKFLVMASEDALCTVLHLTERLFLDHPHRLTGNKVQQYHRALVAVLLSRTWHVRRQAQQTVRKLLSSLGGFKLAHGLLEELKTVLSSHKVLPLEALVTDAGEVTEAGKAYVPPRVLQEALCVISGVPGLKGDVTDTEQLAQEMLIISHHPSLVAVQSGLWPALLARMKIDPEAFITRHLDQIIPRMTTQSPLNQSSMNAMGSLSVLSPDRVLPQLISTITASVQNPALRLVTREEFAIMQTPAGELYDKSIIQSAQQDSIKKANMKRENKAYSFKEQIIELELKEEIKKKKGIKEEVQLTSKQKEMLQAQLDREAQVRRRLQELDGELEAALGLLDIILAKNPSGLTQYIPVLVDSFLPLLKSPLAAPRIKNPFLSLAACVMPSRLKALGTLVSHVTLRLLKPECVLDKSWCQEELSVAVKRAVMLLHTHTITSRVGKGEPGAAPLSAPAFSLVFPFLKMVLTEMPHHSEEEEEWMAQILQILTVQAQLRASPNTPPGRVDENGPELLPRVAMLRLLTWVIGTGSPRLQVLASDTLTTLCASSSGDDGCAFAEQEEVDVLLCALQSPCASVRETVLRGLMELHMVLPAPDTDEKNGLNLLRRLWVVKFDKEEEIRKLAERLWSMMGLDLQPDLCSLLIDDVIYHEAAVRQAGAEALSQAVARYQRQAAEVMGRLMEIYQEKLYRPPPVLDALGRVISESPPDQWEARCGLALALNKLSQYLDSSQVKPLFQFFVPDALNDRHPDVRKCMLDAALATLNTHGKENVNSLLPVFEEFLKNAPNDASYDAVRQSVVVLMGSLAKHLDKSDPKVKPIVAKLIAALSTPSQQVQESVASCLPPLVPAIKEDAGGMIQRLMQQLLESDKYAERKGAAYGLAGLVKGLGILSLKQQEMMAALTDAIQDKKNFRRREGALFAFEMLCTMLGKLFEPYVVHVLPHLLLCFGDGNQYVREAADDCAKAVMSNLSAHGVKLVLPSLLAALEEESWRTKAGSVELLGAMAYCAPKQLSSCLPNIVPKLTEVLTDSHVKVQKAGQQALRQIGSVIRNPEILAIAPVLLDALTDPSRKTQKCLQTLLDTKFVHFIDAPSLALIMPIVQRAFQDRSTDTRKMAAQIIGNMYSLTDQKDLAPYLPSVTPGLKASLLDPVPEVRTVSAKALGAMVKGMGESCFEDLLPWLMETLTYEQSSVDRSGAAQGLAEVMAGLGVEKLEKLMPEIVATASKVDIAPHVRDGYIMMFNYLPITFGDKFTPYVGPIIPCILKALADENEFVRDTALRAGQRVISMYAETAIALLLPQLEQGLFDDLWRIRFSSVQLLGDLLFHISGVTGKMTTETASEDDNFGTAQSNKAIITALGVERRNRVLAGLYMGRSDTQLVVRQASLHVWKIVVSNTPRTLREILPTLFGLLLGFLASTCADKRTIAARTLGDLVRKLGEKILPEIIPILEEGLRSQKSDERQGVCIGLSEIMKSTSRDAVLYFSESLVPTARKALCDPLEEVREAAAKTFEQLHSTIGHQALEDILPFLLKQLDDEEVSEFALDGLKQVMAIKSRVVLPYLVPKLTTPPVNTRVLAFLSSVAGDALTRHLGVILPAVMLALKEKLGTPDEQLEMANCQAVILSVEDDTGHRIIIEDLLEATRSPEVGMRQAAAIILNIYCSRSKADYTSHLRSLVSGLIRLFNDSSPVVLEESWDALNAITKKLDAGNQLALIEELHKEIRLIGNESKGEHVPGFCLPKKGVTSILPVLREGVLTGSPEQKEEAAKALGLVIRLTSADALRPSVVSITGPLIRILGDRFSWNVKAALLETLSLLLAKVGIALKPFLPQLQTTFTKALQDSNRGVRLKAADALGKLISIHIKVDPLFTELLNGIRAMEDPGVRDTMLQALRFVIQGAGAKVDAVIRKNIVSLLLSMLGHDEDNTRISSAGCLGELCAFLTEEELSAVLQQCLLADVSGIDWMVRHGRSLALSVAVNVAPGRLCAGRYSSDVQEMILSSATADRIPIAVSGVRGMGFLMRHHIETGGGQLPAKLSSLFVKCLQNPSSDIRLVAEKMIWWANKDPLPPLDPQAIKPILKALLDNTKDKNTVVRAYSDQAIVNLLKMRQGEEVFQSLSKILDVASLEVLNEVNRRSLKKLASQADSTEQVDDTILT

SEQ ID NO: 117 - protein, 3065 aa, Homo sapiens
MEEKQQIILANQDGGTVAGAAPTFFVILKQPGNGKTDQGILVTNQDACALASSVSSPVKSKGKICLPADCTVGGITVTLDNNSMWNEFYHRSTEMILTKQGRRMFPYCRYWITGLDSNLKYILVMDISPVDNHRYKWNGRWWEPSGKAEPHVLGRVFIHPESPSTGHYWMHQPVSFYKLKLTNNTLDQEGHIILHSMHRYLPRLHLVPAEKAVEVIQLNGPGVHTFTFPQTEFFAVTAYQNIQITQLKIDYNPFAKGFRDDGLNNKPQRDGKQKNSSDQEGNNISSSSGHRVRLTEGQGSEIQPGDLDPLSRGHETSGKGLEKTSLNIKRDFLGFMDTDSALSEVPQLKQEISECLIASSFEDDSRVASPLDQNGSFNVVIKEEPLDDYDYELGECPEGVTVKQEETDEETDVYSNSDDDPILEKQLKRHNKVDNPEADHLSSKWLPSSPSGVAKAKMFKLDTGKMPVVYLEPCAVTRSTVKISELPDNMLSTSRKDKSSMLAELEYLPTYIENSNETAFCLGKESENGLRKHSPDLRVVQKYPLLKEPQWKYPDISDSISTERILDDSKDSVGDSLSGKEDLGRKRTTMLKIATAAKVVNANQNASPNVPGKRGRPRKLKLCKAGRPPKNTGKSLISTKNTPVSPGSTFPDVKPDLEDVDGVLFVSFESKEALDIHAVDGTTEESSSLQASTTNDSGYRARISQLEKELIEDLKTLRHKQVIHPGLQEVGLKLNSVDPTMSIDLKYLGVQLPLAPATSFPFWNLTGTNPASPDAGFPFVSRTGKTNDFTKIKGWRGKFHSASASRNEGGNSESSLKNRSAFCSDKLDEYLENEGKLMETSMGFSSNAPTSPVVYQLPTKSTSYVRTLDSVLKKQSTISPSTSYSLKPHSVPPVSRKAKSQNRQATFSGRTKSSYKSILPYPVSPKQKYSHVILGDKVTKNSSGIISENQANNFVVPTLDENIFPKQISLRQAQQQQQQQQGSRPPGLSKSQVKLMDLEDCALWEGKPRTYITEERADVSLTTLLTAQASLKTKPIHTIIRKRAPPCNNDFCRLGCVCSSLALEKRQPAHCRRPDCMFGCTCLKRKVVLVKGGSKTKHFQRKAAHRDPVFYDTLGEEAREEEEGIREEEEQLKEKKKRKKLEYTICETEPEQPVRHYPLWVKVEGEVDPEPVYIPTPSVIEPMKPLLLPQPEVLSPTVKGKLLTGIKSPRSYTPKPNPVIREEDKDPVYLYFESMMTCARVRVYERKKEDQRQPSSSSSPSPSFQQQTSCHSSPENHNNAKEPDSEQQPLKQLTCDLEDDSDKLQEKSWKSSCNEGESSSTSYMHQRSPGGPTKLIEIISDCNWEEDRNKILSILSQHINSNMPQSLKVGSFIIELASQRKSRGEKNPPVYSSRVKISMPSCQDQDDMAEKSGSETPDGPLSPGKMEDISPVQTDALDSVRERLHGGKGLPFYAGLSPAGKLVAYKRKPSSSTSGLIQVASNAKVAASRKPRTLLPSTSNSKMASSSGTATNRPGKNLKAFVPAKRPIAARPSPGGVFTQFVMSKVGALQQKIPGVSTPQTLAGTQKFSIRPSPVMVVTPVVSSEPVQVCSPVTAAVTTTTPQVFLENTTAVTPMTAISDVETKETTYSSGATTTGVVEVSETNTSTSVTSTQSTATVNLTKTTGITTPVASVAFPKSLVASPSTITLPVASTASTSLVVVTAAASSSMVTTPTSSLGSVPIILSGINGSPPVSQRPENAAQIPVATPQVSPNTVKRAGPRLLLIPVQQGSPTLRPVSNTQLQGHRMVLQPVRSPSGMNLFRHPNGQIVQLLPLHQLRGSNTQPNLQPVMFRNPGSVMGIRLPAPSKPSETPPSSTSSSAFSVMNPVIQAVGSSSAVNVITQAPSLLSSGASFVSQAGTLTLRISPPEPQSFASKTGSETKITYSSGGQPVGTASLIPLQSGSFALLQLPGQKPVPSSILQHVASLQMKRESQNPDQKDETNSIKREQETKKVLQSEGEAVDPEANVIKQNSGAATSEETLNDSLEDRGDHLDEECLPEEGCATVKPSEHSCITGSHTDQDYKDVNEEYGARNRKSSKEKVAVLEVRTISEKASNKTVQNLSKVQHQKLGDVKVEQQKGFDNPEENSSEFPVTFKEESKFELSGSKVMEQQSNLQPEAKEKECGDSLEKDRERWRKHLKGPLTRKCVGASQECKKEADEQLIKETKTCQENSDVFQQEQGISDLLGKSGITEDARVLKTECDSWSRISNPSAFSIVPRRAAKSSRGNGHFQGHLLLPGEQIQPKQEKKGGRSSADFTVLDLEEDDEDDNEKTDDSIDEIVDVVSDYQSEEVDDVEKNNCVEYIEDDEEHVDIETVEELSEEINVAHLKTTAAHTQSFKQPSCTHISADEKAAERSRKAPPIPLKLKPDYWSDKLQKEAEAFAYYRRTHTANERRRRGEMRDLFEKLKITLGLLHSSKVSKSLILTRAFSEIQGLTDQADKLIGQKNLLTRKRNILIRKVSSLSGKTEEVVLKKLEYIYAKQQALEAQKRKKKMGSDEFDISPRISKQQEGSSASSVDLGQMFINNRRGKPLILSRKKDQATENTSPLNTPHTSANLVMTPQGQLLTLKGPLFSGPVVAVSPDLLESDLKPQVAGSAVALPENDDLFMMPRIVNVTSLATEGGLVDMGGSKYPHEVPDSKPSDHLKDTVRNEDNSLEDKGRISSRGNRDGRVTLGPTQVFLANKDSGYPQIVDVSNMQKAQEFLPKKISGDMRGIQYKWKESESRGERVKSKDSSFHKLKMKDLKDSSIEMELRKVTSAIEEAALDSSELLTNMEDEDDTDETLTSLLNEIAFLNQQLNDDSVGLAELPSSMDTEFPGDARRAFISKVPPGSRATFQVEHLGTGLKELPDVQGESDSISPLLLHLEDDDFSENEKQLAEPASEPDVLKIVIDSEIKDSLLSNKKAIDGGKNTSGLPAEPESVSSPPTLHMKTGLENSNSTDTLWRPMPKLAPLGLKVANPSSDADGQSLKVMPCLAPIAAKVGSVGHKMNLTGNDQEGRESKVMPTLAPVVAKLGNSGASPSSAGK

SEQ ID NO: 118 - protein, 2785 aa, Homo sapiens
MKTKPVSHKTENTYRFLTFAERLGNVNIDIIHRIDRTASYEEEVETYFFEGLLKWRELNLTEHFGKFYKEVIDKCQSFNQLVYHQNEIVQSLKTHLQVKNSFAYQPLLDLVVQLARDLQMDFYPHFPEFFLTITSILETQDTELLEWAFTSLSYLYKYLWRLMVKDMSSIYSMYSTLLAHKKLHIRNFAAESFTFLMRKVSDKNALFNLMFLDLDKHPEKVEGVGQLLFEMCKGVRNMFHSCTGQAVKLILRKLGPVTETETQLPWMLIGETLKNMVKSTVSYISKEHFGTFFECLQESLLDLHTKVTKTNCCESSEQIKRLLETYLILVKHGSGTKIPTPADVCKVLSQTLQVASLSTSCWETLLDVISALILGENVSLPETLIKETIEKIFESRFEKRLIFSFSEVMFAMKQFEQLFLPSFLSYIVNCFLIDDAVVKDEALAILAKLILNKAAPPTAGSMAIEKYPLVFSPQMVGFYIKQKKTRSKGRNEQFPVLDHLLSIIKLPPNKDTTYLSQSWAALVVLPHIRPLEKEKVIPLVTGFIEALFMTVDKGSFGKGNLFVLCQAVNTLLSLEESSELLHLVPVERVKNLVLTFPLEPSVLLLTDLYYQRLALCGCKGPLSQEALMELFPKLQANISTGVSKIRLLTIRILNHFDVQLPESMEDDGLSERQSVFAILRQAELVPATVNDYREKLLHLRKLRHDVVQTAVPDGPLQEVPLRYLLGMLYINFSALWDPVIELISSHAHEMENKQFWKVYYEHLEKAATHAEKELQNDMTDEKSVGDESWEQTQEGDVGALYHEQLALKTDCQERLDHTNFRFLLWRALTKFPERVEPRSRELSPLFLRFINNEYYPADLQVAPTQDLRRKGKGMVAEEIEEEPAAGDDEELEEEAVPQDESSQKKKTRRAAAKQLIAHLQVFSKFSNPRALYLESKLYELYLQLLLHQDQMVQKITLDCIMTYKHPHVLPYRENLQRLLEDRSFKEEIVHFSISEDNAVVKTAHRADLFPILMRILYGRMKNKTGSKTQGKSASGTRMAIVLRFLAGTQPEEIQIFLDLLFEPVRHFKNGECHSAVIQAVEDLDLSKVLPLGRQHGILNSLEIVLKNISHLISAYLPKILQILLCMTATVSHILDQREKIQLRFINPLKNLRRLGIKMVTDIFLDWESYQFRTEEIDAVFHGAVWPQISRLGSESQYSPTPLLKLISIWSRNARYFPLLAKQKPGHPECDILTNVFAILSAKNLSDATASIVMDIVDDLLNLPDFEPTETVLNLLVTGCVYPGIAENIGESITIGGRLILPHVPAILQYLSKTTISAEKVKKKKNRAQVSKELGILSKISKFMKDKEQSSVLITLLLPFLHRGNIAEDTEVDILVTVQNLLKHCVDPTSFLKPIAKLFSVIKNKLSRKLLCTVFETLSDFESGLKYITDVVKLNAFDQRHLDDINFDVRFETFQTITSYIKEMQIVDVNYLIPVMHNCFYNLELGDMSLSDNASMCLMSIIKKLAALNVTEKDYREIIHRSLLEKLRKGLKSQTESIQQDYTTILSCLIQTFPNQLEFKDLVQLTHYHDPEMDFFENMKHIQIHRRARALKKLAKQLMEGKVVLSSKSLQNYIMPYAMTPIFDEKMLKHENITTAATEIIGAICKHLSWSAYMYYLKHFIHVLQTGQINQKLGVSLLVIVLEAFHFDHKTLEEQMGKIENEENAIEAIELPEPEAMELERVDEEEKEYTCKSLSDNGQPGTPDPADSGGTSAKESECITKPVSFLPQNKEEIERTIKNIQGTITGDILPRLHKCLASTTKREEEHKLVKSKVVNDEEVVRVPLAFAMVKLMQSLPQEVMEANLPSILLKVCALLKNRAQEIRDIARSTLAKIIEDLGVHFLLYVLKELQTTLVRGYQVHVLTFTVHMLLQGLTNKLQVGDLDSCLDIMIEIFNHELFGAVAEEKEVKQILSKVMEARRSKSYDSYEILGKFVGKDQVTKLILPLKEILQNTTSLKLARKVHETLRRITVGLIVNQEMTAESILLLSYGLISENLPLLTEKEKNPVAPAPDPRLPPQSCLLLPPTPVRGGQKAVVSRKTNMHIFIESGLRLLHLSLKTSKIKSSGECVLEMLDPFVSLLIDCLGSMDVKVITGALQCLIWVLRFPLPSIETKAEQLTKHLFLLLKDYAKLGAARGQNFHLVVNCFKCVTILVKKVKSYQITEKQLQVLLAYAEEDIYDTSRQATAFGLLKAILSRKLLVPEIDEVMRKVSKLAVSAQSEPARVQCRQVFLKYILDYPLGDKLRPNLEFMLAQLNYEHETGRESTLEMIAYLFDTFPQGLLHENCGMFFIPLCLMTINDDSATCKKMASMTIKSLLGKISLEKKDWLFDMVTTWFGAKKRLNRQLAALICGLFVESEGVDFEKRLGTVLPVIEKEIDPENFKDIMEETEEKAADRLLFSFLTLITKLIKECNIIQFTKPAETLSKIWSHVHSHLRHPHNWVWLTAAQIFGLLFASCQPEELIQKWNTKKTKKHLPEPVAIKFLASDLDQKMKSISLASCHQLHSKFLDQSLGEQVVKNLLFAAKVLYLLELYCEDKQSKIKEDLEEQEALEDGVACADEKAESDGEEKEEVKEELGRPATLLWLIQKLSRIAKLEAAYSPRNPLKRTCIFKFLGAVAMDLGIDKVKPYLPMIIAPLFRELNSTYSEQDPLLKNLSQEIIELLKKLVGLESFSLAFASVQKQANEKRALRKKRKALEFVTNPDIAAKKKMKKHKNKSEAKKRKIEFLRPGYKAKRQKSHSLKDLAMVE

SEQ ID NO: 119 - protein, 4547 aa, Homo sapiens
MSQHQLRVPQPEGLGRKRTSSEDNLYLAVLRASEGKKDERDRVQKKTFTKWVNKHLIKAQRHISDLYEDLRDGHNLISLLEVLSGDSLPREKGRMRFHKLQNVQIALDYLRHRQVKLVNIRNDDIADGNPKLTLGLIWTIILHFQISDIQVSGQSEDMTAKEKLLLWSQRMVEGYQGLRCDNFTSSWRDGRLFNAIIHRHKPLLIDMNKVYRQTNLENLDQAFSVAERDLGVTRLLDPEDVDVPQPDEKSIITYVSSLYDAMPRVPDVQDGVRANELQLRWQEYRELVLLLLQWMRHHTAAFEERRFPSSFEEIEILWSQFLKFKEMELPAKEADKNRSKGIYQSLEGAVQAGQLKVPPGYHPLDVEKEWGKLHVAILEREKQLRSEFERLECLQRIVTKLQMEAGLCEEQLNQADALLQSDVRLLAAGKVPQRAGEVERDLDKADSMIRLLFNDVQTLKDGRHPQGEQMYRRVYRLHERLVAIRTEYNLRLKAGVAAPATQVAQVTLQSVQRRPELEDSTLRYLQDLLAWVEENQHRVDGAEWGVDLPSVEAQLGSHRGLHQSIEEFRAKIERARSDEGQLSPATRGAYRDCLGRLDLQYAKLLNSSKARLRSLESLHSFVAAATKELMWLNEKEEEEVGFDWSDRNTNMTAKKESYSALMRELELKEKKIKELQNAGDRLLREDHPARPTVESFQAALQTQWSWMLQLCCCIEAHLKENAAYFQFFSDVREAEGQLQKLQEALRRKYSCDRSATVTRLEDLLQDAQDEKEQLNEYKGHLSGLAKRAKAVVQLKPRHPAHPMRGRLPLLAVCDYKQVEVTVHKGDECQLVGPAQPSHWKVLSSSGSEAAVPSVCFLVPPPNQEAQEAVTRLEAQHQALVTLWHQLHVDMKSLLAWQSLRRDVQLIRSWSLATFRTLKPEEQRQALHSLELHYQAFLRDSQDAGGFGPEDRLMAEREYGSCSHHYQQLLQSLEQGAQEESRCQRCISELKDIRLQLEACETRTVHRLRLPLDKEPARECAQRIAEQQKAQAEVEGLGKGVARLSAEAEKVLALPEPSPAAPTLRSELELTLGKLEQVRSLSAIYLEKLKTISLVIRGTQGAEEVLRAHEEQLKEAQAVPATLPELEATKASLKKLRAQAEAQQPTFDALRDELRGAQEVGERLQQRHGERDVEVERWRERVAQLLERWQAVLAQTDVRQRELEQLGRQLRYYRESADPLGAWLQDARRRQEQIQAMPLADSQAVREQLRQEQALLEEIERHGEKVEECQRFAKQYINAIKDYELQLVTYKAQLEPVASPAKKPKVQSGSESVIQEYVDLRTHYSELTTLTSQYIKFISETLRRMEEEERLAEQQRAEERERLAEVEAALEKQRQLAEAHAQAKAQAEREAKELQQRMQEEVVRREEAAVDAQQQKRSIQEELQQLRQSSEAEIQAKARQAEAAERSRLRIEEEIRVVRLQLEATERQRGGAEGELQALRARAEEAEAQKRQAQEEAERLRRQVQDESQRKRQAEVELASRVKAEAEAAREKQRALQALEELRLQAEEAERRLRQAEVERARQVQVALETAQRSAEAELQSKRASFAEKTAQLERSLQEEHVAVAQLREEAERRAQQQAEAERAREEAERELERWQLKANEALRLRLQAEEVAQQKSLAQAEAEKQKEEAEREARRRGKAEEQAVRQRELAEQELEKQRQLAEGTAQQRLAAEQELIRLRAETEQGEQQRQLLEEELARLQREAAAATQKRQELEAELAKVRAEMEVLLASKARAEEESRSTSEKSKQRLEAEAGRFRELAEEAARLRALAEEAKRQRQLAEEDAARQRAEAERVLAEKLAAIGEATRLKTEAEIALKEKEAENERLRRLAEDEAFQRRRLEEQAAQHKADIEERLAQLRKASDSELERQKGLVEDTLRQRRQVEEEILALKASFEKAAAGKAELELELGRIRSNAEDTLRSKEQAELEAARQRQLAAEEERRRREAEERVQKSLAAEEEAARQRKAALEEVERLKAKVEEARRLRERAEQESARQLQLAQEAAQKRLQAEEKAHAFAVQQKEQELQQTLQQEQSVLDQLRGEAEAARRAAEEAEEARVQAEREAAQSRRQVEEAERLKQSAEEQAQARAQAQAAAEKLRKEAEQEAARRAQAEQAALRQKQAADAEMEKHKKFAEQTLRQKAQVEQELTTLRLQLEETDHQKNLLDEELQRLKAEATEAARQRSQVEEELFSVRVQMEELSKLKARIEAENRALILRDKDNTQRFLQEEAEKMKQVAEEAARLSVAAQEAARLRQLAEEDLAQQRALAEKMLKEKMQAVQEATRLKAEAELLQQQKELAQEQARRLQEDKEQMAQQLAEETQGFQRTLEAERQRQLEMSAEAERLKLRVAEMSRAQARAEEDAQRFRKQAEEIGEKLHRTELATQEKVTLVQTLEIQRQQSDHDAERLREAIAELEREKEKLQQEAKLLQLKSEEMQTVQQEQLLQETQALQQSFLSEKDSLLQRERFIEQEKAKLEQLFQDEVAKAQQLREEQQRQQQQMEQERQRLVASMEEARRRQHEAEEGVRRKQEELQQLEQQRRQQEELLAEENQRLREQLQLLEEQHRAALAHSEEVTASQVAATKTLPNGRDALDGPAAEAEPEHSFDGLRRKVSAQRLQEAGILSAEELQRLAQGHTTVDELARREDVRHYLQGRSSIAGLLLKATNEKLSVYAALQRQLLSPGTALILLEAQAASGFLLDPVRNRRLTVNEAVKEGVVGPELHHKLLSAERAVTGYKDPYTGQQISLFQAMQKGLIVREHGIRLLEAQIATGGVIDPVHSHRVPVDVAYRRGYFDEEMNRVLADPSDDTKGFFDPNTHENLTYLQLLERCVEDPETGLCLLPLTDKAAKGGELVYTDSEARDVFEKATVSAPFGKFQGKTVTIWEIINSEYFTAEQRRDLLRQFRTGRITVEKIIKIIITVVEEQEQKGRLCFEGLRSLVPAAELLESRVIDRELYQQLQRGERSVRDVAEVDTVRRALRGANVIAGVWLEEAGQKLSIYNALKKDLLPSDMAVALLEAQAGTGHIIDPATSARLTVDEAVRAGLVGPEFHEKLLSAEKAVTGYRDPYTGQSVSLFQALKKGLIPREQGLRLLDAQLSTGGIVDPSKSHRVPLDVACARGCLDEETSRALSAPRADAKAYSDPSTGEPATYGELQQRCRPDQLTGLSLLPLSEKAARARQEELYSELQARETFEKTPVEVPVGGFKGRTVTVWELISSEYFTAEQRQELLRQFRTGKVTVEKVIKILITIVEEVETLRQERLSFSGLRAPVPASELLASGVLSRAQFEQLKDGKTTVKDLSELGSVRTLLQGSGCLAGIYLEDTKEKVSIYEAMRRGLLRATTAALLLEAQAATGFLVDPVRNQRLYVHEAVKAGVVGPELHEQLLSAEKAVTGYRDPYSGSTISLFQAMQKGLVLRQHGIRLLEAQIATGGIIDPVHSHRVPVDVAYQRGYFSEEMNRVLADPSDDTKGFFDPNTHENLTYRQLLERCVEDPETGLRLLPLKGAEKAEVVETTQVYTEEETRRAFEETQIDIPGGGSHGGSTMSLWEVMQSDLIPEEQRAQLMADFQAGRVTKERMIIIIIEIIEKTEIIRQQGLASYDYVRRRLTAEDLFEARIISLETYNLLREGTRSLREALEAESAWCYLYGTGSVAGVYLPGSRQTLSIYQALKKGLLSAEVARLLLEAQAATGFLLDPVKGERLTVDEAVRKGLVGPELHDRLLSAERAVTGYRDPYTEQTISLFQAMKKELIPTEEALRLLDAQLATGGIVDPRLGFHLPLEVAYQRGYLNKDTHDQLSEPSEVRSYVDPSTDERLSYTQLLRRCRRDDGTGQLLLPLSDARKLTFRGLRKQITMEELVRSQVMDEATALQLREGLTSIEEVTKNLQKFLEGTSCIAGVFVDATKERLSVYQAMKKGIIRPGTAFELLEAQAATGYVIDPIKGLKLTVEEAVRMGIVGPEFKDKLLSAERAVTGYKDPYSGKLISLFQAMKKGLILKDHGIRLLEAQIATGGIIDPEESHRLPVEVAYKRGLFDEEMNEILTDPSDDTKGFFDPNTEENLTYLQLMERCITDPQTGLCLLPLKEKKRERKTSSKSSVRKRRVVIVDPETGKEMSVYEAYRKGLIDHQTYLELSEQECEWEEITISSSDGVVKSMIIDRRSGRQYDIDDAIAKNLIDRSALDQYRAGTLSITEFADMLSGNAGGFRSRSSSVGSSSSYPISPAVSRTQLASWSDPTEETGPVAGILDTETLEKVSITEAMHRNLVDNITGQRLLEAQACTGGIIDPSTGERFPVTDAVNKGLVDKIMVDRINLAQKAFCGFEDPRTKTKMSAAQALKKGWLYYEAGQRFLEVQYLTGGLIEPDTPGRVPLDEALQRGTVDARTAQKLRDVGAYSKYLTCPKTKLKISYKDALDRSMVEEGTGLRLLEAAAQSTKGYYSPYSVSGSGSTAGSRTGSRTGSRAGSRRGSFDATGSGFSMTFSSSSYSSSGYGRRYASGSSASLGGPESAVA

SEQ ID NO: 120 - protein, 286 aa, Homo sapiens
MAEDGEEAEFHFAALYISGQWPRLRADTDLQRLGSSAMAPSRKFFVGGNWKMNGRKQSLGELIGTLNAAKVPADTEVVCAPPTAYIDFARQKLDPKIAVAAQNCYKVTNGAFTGEISPGMIKDCGATWVVLGHSERRHVFGESDELIGQKVAHALAEGLGVIACIGEKLDEREAGITEKVVFEQTKVIADNVKDWSKVVLAYEPVWAIGTGKTATPQQAQEVHEKLRGWLKSNVSDAVAQSTRIIYGGSVTGATCKELASQPDVDGFLVGGASLKPEFVDIINAKQ

SEQ ID NO: 121 - protein, 2490 aa, Homo sapiens
MHVSLAEALEVRGGPLQEEEIWAVLNQSAESLQELFRKVSLADPAALGFIISPWSLLLLPSGSVSFTDENISNQDLRAFTAPEVLQNQSLTSLSDVEKIHIYSLGMTLYWGADYEVPQSQPIKLGDHLNSILLGMCEDVIYARVSVRTVLDACSAHIRNSNCAPSFSYVKHLVKLVLGNLSGTDQLSCNSEQKPDRSQAIRDRLRGKGLPTGRSSTSDVLDIQKPPLSHQTFLNKGLSKSMGFLSIKDTQDENYFKDILSDNSGREDSENTFSPYQFKTSGPEKKPIPGIDVLSKKKIWASSMDLLCTADRDFSSGETATYRRCHPEAVTVRTSTTPRKKEARYSDGSIALDIFGPQKMDPIYHTRELPTSSAISSALDRIRERQKKLQVLREAMNVEEPVRRYKTYHGDVFSTSSESPSIISSESDFRQVRRSEASKRFESSSGLPGVDETLSQGQSQRPSRQYETPFEGNLINQEIMLKRQEEELMQLQAKMALRQSRLSLYPGDTIKASMLDITRDPLREIALETAMTQRKLRNFFGPEFVKMTIEPFISLDLPRSILTKKGKNEDNRRKVNIMLLNGQRLELTCDTKTICKDVFDMVVAHIGLVEHHLFALATLKDNEYFFVDPDLKLTKVAPEGWKEEPKKKTKATVNFTLFFRIKFFMDDVSLIQHTLTCHQYYLQLRKDILEERMHCDDETSLLLASLALQAEYGDYQPEVHGVSYFRMEHYLPARVMEKLDLSYIKEELPKLHNTYVGASEKETELEFLKVCQRLTEYGVHFHRVHPEKKSQTGILLGVCSKGVLVFEVHNGVRTLVLRFPWRETKKISFSKKKITLQNTSDGIKHGFQTDNSKICQYLLHLCSYQHKFQLQMRARQSNQDAQDIERASFRSLNLQAESVRGFNMGRAISTGSLASSTLNKLAVRPLSVQAEILKRLSCSELSLYQPLQNSSKEKNDKASWEEKPREMSKSYHDLSQASLYPHRKNVIVNMEPPPQTVAELVGKPSHQMSRSDAESLAGVTKLNNSKSVASLNRSPERRKHESDSSSIEDPGQAYVLGMTMHSSGNSSSQVPLKENDVLHKRWSIVSSPEREITLVNLKKDAKYGLGFQIIGGEKMGRLDLGIFISSVAPGGPADLDGCLKPGDRLISVNSVSLEGVSHHAAIEILQNAPEDVTLVISQPKEKISKVPSTPVHLTNEMKNYMKKSSYMQDSAIDSSSKDHHWSRGTLRHISENSFGPSGGLREGSLSSQDSRTESASLSQSQVNGFFASHLGDQTWQESQHGSPSPSVISKATEKETFTDSNQSKTKKPGISDVTDYSDRGDSDMDEATYSSSQDHQTPKQESSSSVNTSNKMNFKTFSSSPPKPGDIFEVELAKNDNSLGISVTVLFDKGGVNTSVRHGGIYVKAVIPQGAAESDGRIHKGDRVLAVNGVSLEGATHKQAVETLRNTGQVVHLLLEKGQSPTSKEHVPVTPQCTLSDQNAQGQGPEKVKKTTQVKDYSFVTEENTFEVKLFKNSSGLGFSFSREDNLIPEQINASIVRVKKLFPGQPAAESGKIDVGDVILKVNGASLKGLSQQEVISALRGTAPEVFLLLCRPPPGVLPEIDTALLTPLQSPAQVLPNSSKDSSQPSCVEQSTSSDENEMSDKSKKQCKSPSRRDSYSDSSGSGEDDLVTAPANISNSTWSSALHQTLSNMVSQAQSHHEAPKSQEDTICTMFYYPQKIPNKPEFEDSNPSPLPPDMAPGQSYQPQSESASSSSMDKYHIHHISEPTRQENWTPLKNDLENHLEDFELEVELLITLIKSEKGSLGFTVTKGNQRIGCYVHDVIQDPAKSDGRLKPGDRLIKVNDTDVTNMTHTDAVNLLRAASKTVRLVIGRVLELPRIPMLPHLLPDITLTCNKEELGFSLCGGHDSLYQVVYISDINPRSVAAIEGNLQLLDVIHYVNGVSTQGMTLEEVNRALDMSLPSLVLKATRNDLPVVPSSKRSAVSAPKSTKGNGSYSVGSCSQPALTPNDSFSTVAGEEINEISYPKGKCSTYQIKGSPNLTLPKESYIQEDDIYDDSQEAEVIQSLLDVVDEEAQNLLNENNAAGYSCGPGTLKMNGKLSEERTEDTDCDGSPLPEYFTEATKMNGCEEYCEEKVKSESLIQKPQEKKTDDDEITWGNDELPIERTNHEDSDKDHSFLTNDELAVLPVVKVLPSGKYTGANLKSVIRVLRGLLDQGIPSKELENLQELKPLDQCLIGQTKENRRKNRYKNILPYDATRVPLGDEGGYINASFIKIPVGKEEFVYIACQGPLPTTVGDFWQMIWEQKSTVIAMMTQEVEGEKIKCQRYWPNILGKTTMVSNRLRLALVRMQQLKGFVVRAMTLEDIQTREVRHISHLNFTAWPDHDTPSQPDDLLTFISYMRHIHRSGPIITHCSAGIGRSGTLICIDVVLGLISQDLDFDISDLVRCMRLQRHGMVQTEDQYIFCYQVILYVLTRLQAEEEQKQQPQLLK

SEQ ID NO: 122 - protein, 4861 aa, Homo sapiens
MATMIPPVKLKWLEHLNSSWITEDSESIATREGVAVLYSKLVSNKEVVPLPQQVLCLKGPQLPDFERESLSSDEQDHYLDALLSSQLALAKMVCSDSPFAGALRKRLLVLQRVFYALSNKYHDKGKVKQQQHSPESSSGSADVHSVSERPRSSTDALIEMGVRTGLSLLFALLRQSWMMPVSGPGLSLCNDVIHTAIEVVSSLPPLSLANESKIPPMGLDCLSQVTTFLKGVTIPNSGADTLGRRLASELLLGLAAQRGSLRYLLEWIEMALGASAVVHTMEKGKLLSSQEGMISFDCFMTILMQMRRSLGSSADRSQWREPTRTSDGLCSLYEAALCLFEEVCRMASDYSRTCASPDSIQTGDAPIVSETCEVYVWGSNSSHQLVEGTQEKILQPKLAPSFSDAQTIEAGQYCTFVISTDGSVRACGKGSYGRLGLGDSNNQSTLKKLTFEPHRSIKKVSSSKGSDGHTLAFTTEGEVFSWGDGDYGKLGHGNSSTQKYPKLIQGPLQGKVVVCVSAGYRHSAAVTEDGELYTWGEGDFGRLGHGDSNSRNIPTLVKDISNVGEVSCGSSHTIALSKDGRTVWSFGGGDNGKLGHGDTNRVYKPKVIEALQGMFIRKVCAGSQSSLALTSTGQVYAWGCGACLGCGSSEATALRPKLIEELAATRIVDVSIGDSHCLALSHDNEVYAWGNNSMGQCGQGNSTGPITKPKKVSGLDGIAIQQISAGTSHSLAWTALPRDRQVVAWHRPYCVDLEESTFSHLRSFLERYCDKINSEIPPLPFPSSREHHSFLKLCLKLLSNHLALALAGGVATSILGRQAGPLRNLLFRLMDSTVPDEIQEVVIETLSVGATMLLPPLRERMELLHSLLPQGPDRWESLSKGQRMQLDIILTSLQDHTHVASLLGYSSPSDAADLSSVCTGYGNLSDQPYGTQSCHPDTHLAEILMKTLLRNLGFYTDQAFGELEKNSDKFLLGTSSSENSQPAHLHELLCSLQKQLLAFCHINNISENSSSVALLHKHLQLLLPHATDIYSRSANLLKESPWNGSVGEKLRDVIYVSAAGSMLCQIVNSLLLLPVSVARPLLSYLLDLLPPLDCLNRLLPAADLLEDQELQWPLHGGPELIDPAGLPLPQPAQSWVWLVDLERTIALLIGRCLGGMLQGSPVSPEEQDTAYWMKTPLFSDGVEMDTPQLDKCMSCLLEVALSGNEEQKPFDYKLRPEIAVYVDLALGCSKEPARSLWISMQDYAVSKDWDSATLSNESLLDTVSRFVLAALLKHTNLLSQACGESRYQPGKHLSEVYRCVYKVRSRLLACKNLELIQTRSSSRDRWISENQDSADVDPQEHSFTRTIDEEAEMEEQAERDREEGHPEPEDEEEEREHEVMTAGKIFQCFLSAREVARSRDRDRMNSGAGSGARADDPPPQSQQERRVSTDLPEGQDVYTAACNSVIHRCALLILGVSPVIDELQKRREEGQLQQPSTSASEGGGLMTRSESLTAESRLVHTSPNYRLIKSRSESDLSQPESDEEGYALSGRRNVDLDLAASHRKRGPMHSQLESLSDSWARLKHSRDWLCNSSYSFESDFDLTKSLGVHTLIENVVSFVSGDVGNAPGFKEPEESMSTSPQASIIAMEQQQLRAELRLEALHQILVLLSGMEEKGSISLAGSRLSSGFQSSTLLTSVRLQFLAGCFGLGTVGHTGGKGESGRLHHYQDGIRAAKRNIQIEIQVAVHKIYQQLSATLERALQANKHHIEAQQRLLLVTVFALSVHYQPVDVSLAISTGLLNVLSQLCGTDTMLGQPLQLLPKTGVSQLSTALKVASTRLLQILAITTGTYADKLSPKVVQSLLDLLCSQLKNLLSQTGVLHMASFGEGEQEDGEEEEKKVDSSGETEKKDFRAALRKQHAAELHLGDFLVFLRRVVSSKAIQSKMASPKWTEVLLNIASQKCSSGIPLVGNLRTRLLALHVLEAVLPACESGVEDDQMAQIVERLFSLLSDCMWETPIAQAKHAIQIKEKEQEIKLQKQGELEEEDENLPIQEVSFDPEKAQCCLVENGQILTHGSGGKGYGLASTGVTSGCYQWKFYIVKENRGNEGTCVGVSRWPVHDFNHRTTSDMWLYRAYSGNLYHNGEQTLTLSSFTQGDFITCVLDMEARTISFGKNGEEPKLAFEDVDAAELYPCVMFYSSNPGEKVKICDMQMRGTPRDLLPGDPICSPVAAVLAEATIQLIRILHRTDRWTYCINKKMMERLHKIKICIKESGQKLKKSRSVQSREENEMREEKESKEEEKGKHTRHGLADLSELQLRTLCIEVWPVLAVIGGVDAGLRVGGRCVHKQTGRHATLLGVVKEGSTSAKVQWDEAEITISFPTFWSPSDTPLYNLEPCEPLPFDVARFRGLTASVLLDLTYLTGVHEDMGKQSTKRHEKKHRHESEEKGDVEQKPESESALDMRTGLTSDDVKSQSTTSSKSENEIASFSLDPTLPSVESQHQITEGKRKNHEHMSKNHDVAQSEIRAVQLSYLYLGAMKSLSALLGCSKYAELLLIPKVLAENGHNSDCASSPVVHEDVEMRAALQFLMRHMVKRAVMRSPIKRALGLADLERAQAMIYKLVVHGLLEDQFGGKIKQEIDQQAEESDPAQQAQTPVTTSPSASSTTSFMSSSLEDTTTATTPVTDTETVPASESPGVMPLSLLRQMFSSYPTTTVLPTRRAQTPPISSLPTSPSDEVGRRQSLTSPDSQSARPANRTALSDPSSRLSTSPPPPAIAVPLLEMGFSLRQIAKAMEATGARGEADAQNITVLAMWMIEHPGHEDEEEPQSGSTADSRPGAAVLGSGGKSNDPCYLQSPGDIPSADAAEMEEGFSESPDNLDHTENAASGSGPSARGRSAVTRRHKFDLAARTLLARAAGLYRSVQAHRNQSRREGISLQQDPGALYDFNLDEELEIDLDDEAMEAMFGQDLTSDNDILGMWIPEVLDWPTWHVCESEDREEVVVCELCECSVVSFNQHMKRNHPGCGRSANRQGYRSNGSYVDGWFGGECGSGNPYYLLCGTCREKYLAMKTKSKSTSSERYKGQAPDLIGKQDSVYEEDWDMLDVDEDEKLTGEEEFELLAGPLGLNDRRIVPEPVQFPDSDPLGASVAMVTATNSMEETLMQIGCHGSVEKSSSGRITLGEQAAALANPHDRVVALRRVTAAAQVLLARTMVMRALSLLSVSGSSCSLAAGLESLGLTDIRTLVRLMCLAAAGRAGLSTSPSAMASTSERSRGGHSKANKPISCLAYLSTAVGCLASNAPSAAKLLVQLCTQNLISAATGVNLTTVDDSIQRKFLPSFLRGIAEENKLVTSPNFVVTQALVALLADKGAKLRPNYDKSEVEKKGPLELANALAACCLSSRLSSQHRQWAAQQLVRTLAAHDRDNQTTLQTLADMGGDLRKCSFIKLEAHQNRVMTCVWCNKKGLLATSGNDGTIRVWNVTKKQYSLQQTCVFNRLEGDAEESLGSPSDPSFSPVSWSISGKYLAGALEKMVNIWQVNGGKGLVDIQPHWVSALAWPEEGPATAWSGESPELLLVGRMDGSLGLIEVVDVSTMHRRELEHCYRKDVSVTCIAWFSEDRPFAVGYFDGKLLLGTKEPLEKGGIVLIDAHKDTLISMKWDPTGHILMTCAKEDSVKLWGSISGCWCCLHSLCHPSIVNGIAWCRLPGKGSKLQLLMATGCQSGLVCVWRIPQDTTQTNVTSAEGWWEQESNCQDGYRKSSGAKCVYQLRGHITPVRTVAFSSDGLALVSGGLGGLMNIWSLRDGSVLQTVVIGSGAIQTTVWIPEVGVAACSNRSKDVLVVNCTAEWAAANHVLATCRTALKQQGVLGLNMAPCMRAFLERLPMMLQEQYAYEKPHVVCGDQLVHSPYMQCLASLAVGLHLDQLLCNPPVPPHHQNCLPDPASWNPNEWAWLECFSTTIKAAEALTNGAQFPESFTVPDLEPVPEDELVFLMDNSKWINGMDEQIMSWATSRPEDWHLGGKCDVYLWGAGRHGQLAEAGRNVMVPAAAPSFSQAQQVICGQNCTFVIQANGTVLACGEGSYGRLGQGNSDDLHVLTVISALQGFVVTQLVTSCGSDGHSMALTESGEVFSWGDGDYGKLGHGNSDRQRRPRQIEALQGEEVVQMSCGFKHSAVVTSDGKLFTFGNGDYGRLGLGNTSNKKLPERVTALEGYQIGQVACGLNHTLAVSADGSMVWAFGDGDYGKLGLGNSTAKSSPQKIDVLCGIGIKKVACGTQFSVALTKDGHVYTFGQDRLIGLPEGRARNHNRPQQIPVLAGVIIEDVAVGAEHTLALASNGDVYAWGSNSEGQLGLGHTNHVREPTLVTGLQGKNVRQISAGRCHSAAWTAPPVPPRAPGVSVPLQLGLPDTVPPQYGALREVSIHTVRARLRLLYHFSDLMYSSWRLLNLSPNNQNSTSHYNAGTWGIVQGQLRPLLAPRVYTLPMVRSIGKTMVQGKNYGPQITVKRISTRGRKCKPIFVQIARQVVKLNASDLRLPSRAWKVKLVGEGADDAGGVFDDTITEMCQELETGIVDLLIPSPNATAEVGYNRDRFLFNPSACLDEHLMQFKFLGILMGVAIRTKKPLDLHLAPLVWKQLCCVPLTLEDLEEVDLLYVQTLNSILHIEDSGITEESFHEMIPLDSFVGQSADGKMVPIIPGGNSIPLTFSNRKEYVERAIEYRLHEMDRQVAAVREGMSWIVPVPLLSLLTAKQLEQMVCGMPEISVEVLKKVVRYREVDEQHQLVQWFWHTLEEFSNEERVLFMRFVSGRSRLPANTADISQRFQIMKVDRPYDSLPTSQTCFFQLRLPPYSSQLVMAERLRYAINNCRSIDMDNYMLSRNVDNAEGSDTDY

SEQ ID NO: 123 - protein, 5171 aa, Homo sapiens
MHSSSYSYRSSDSVFSNTTSTRTSLDSNENLLLVHCGPTLINSCISFGSESFDGHRLEMLQQIANRVQRDSVICEDKLILAGNALQSDSKRLESGVQFQNEAEIAGYILECENLLRQHVIDVQILIDGKYYQADQLVQRVAKLRDEIMALRNECSSVYSKGRILTTEQTKLMISGITQSLNSGFAQTLHPSLTSGLTQSLTPSLTSSSMTSGLSSGMTSRLTPSVTPAYTPGFPSGLVPNFSSGVEPNSLQTLKLMQIRKPLLKSSLLDQNLTEEEINMKFVQDLLNWVDEMQVQLDRTEWGSDLPSVESHLENHKNVHRAIEEFESSLKEAKISEIQMTAPLKLTYAEKLHRLESQYAKLLNTSRNQERHLDTLHNFVSRATNELIWLNEKEEEEVAYDWSERNTNIARKKDYHAELMRELDQKEENIKSVQEIAEQLLLENHPARLTIEAYRAAMQTQWSWILQLCQCVEQHIKENTAYFEFFNDAKEATDYLRNLKDAIQRKYSCDRSSSIHKLEDLVQESMEEKEELLQYKSTIANLMGKAKTIIQLKPRNSDCPLKTSIPIKAICDYRQIEITIYKDDECVLANNSHRAKWKVISPTGNEAMVPSVCFTVPPPNKEAVDLANRIEQQYQNVLTLWHESHINMKSVVSWHYLINEIDRIRASNVASIKTMLPGEHQQVLSNLQSRFEDFLEDSQESQVFSGSDITQLEKEVNVCKQYYQELLKSAEREEQEESVYNLYISEVRNIRLRLENCEDRLIRQIRTPLERDDLHESVFRITEQEKLKKELERLKDDLGTITNKCEEFFSQAAASSSVPTLRSELNVVLQNMNQVYSMSSTYIDKLKTVNLVLKNTQAAEALVKLYETKLCEEEAVIADKNNIENLISTLKQWRSEVDEKRQVFHALEDELQKAKAISDEMFKTYKERDLDFDWHKEKADQLVERWQNVHVQIDNRLRDLEGIGKSLKYYRDTYHPLDDWIQQVETTQRKIQENQPENSKTLATQLNQQKMLVSEIEMKQSKMDECQKYAEQYSATVKDYELQTMTYRAMVDSQQKSPVKRRRMQSSADLIIQEFMDLRTRYTALVTLMTQYIKFAGDSLKRLEEEEKSLEEEKKEHVEKAKELQKWVSNISKTLKDAEKAGKPPFSKQKISSEEISTKKEQLSEALQTIQLFLAKHGDKMTDEERNELEKQVKTLQESYNLLFSESLKQLQESQTSGDVKVEEKIVAERQQEYKEKLQGICDLLTQTENRLIGHQEAFMIGDGTVELKKYQSKQEELQKDMQGSAQALAEVVKNTENFLKENGEKLSQEDKALIEQKLNEAKIKCEQLNLKAEQSKKELDKVVTTAIKEETEKVAAVKQLEESKTKIENLLDWLSNVDKDSERAGTKHKQVIEQNGTHFQEGDGKSAIGEEDEVNGNLLETDVDGQVGTTQENLNQQYQKVKAQHEKIISQHQAVIIATQSAQVLLEKQGQYLSPEEKEKLQKNMKELKVHYETALAESEKKMKLTHSLQEELEKFDADYTEFEHWLQQSEQELENLEAGADDINGLMTKLKRQKSFSEDVISHKGDLRYITISGNRVLEAAKSCSKRDGGKVDTSATHREVQRKLDHATDRFRSLYSKCNVLGNNLKDLVDKYQHYEDASCGLLAGLQACEATASKHLSEPIAVDPKNLQRQLEETKALQGQISSQQVAVEKLKKTAEVLLDARGSLLPAKNDIQKTLDDIVGRYEDLSKSVNERNEKLQITLTRSLSVQDGLDEMLDWMGNVESSLKEQGQVPLNSTALQDIISKNIMLEQDIAGRQSSINAMNEKVKKFMETTDPSTASSLQAKMKDLSARFSEASHKHKETLAKMEELKTKVELFENLSEKLQTFLETKTQALTEVDVPGKDVTELSQYMQESTSEFLEHKKHLEVLHSLLKEISSHGLPSDKALVLEKTNNLSKKFKEMEDTIKEKKEAVTSCQEQLDAFQVLVKSLKSWIKETTKKVPIVQPSFGAEDLGKSLEDTKKLQEKWSLKTPEIQKVNNSGISLCNLISAVTTPAKAIAAVKSGGAVLNGEGTATNTEEFWANKGLTSIKKDMTDISHGYEDLGLLLKDKIAELNTKLSKLQKAQEESSAMMQWLQKMNKTATKWQQTPAPTDTEAVKTQVEQNKSFEAELKQNVNKVQELKDKLTELLEENPDTPEAPRWKQMLTEIDSKWQELNQLTIDRQQKLEESSNNLTQFQTVEAQLKQWLVEKELMVSVLGPLSIDPNMLNTQRQQVQILLQEFATRKPQYEQLTAAGQGILSRPGEDPSLRGIVKEQLAAVTQKWDSLTGQLSDRCDWIDQAIVKSTQYQSLLRSLSDKLSDLDNKLSSSLAVSTHPDAMNQQLETAQKMKQEIQQEKKQIKVAQALCEDLSALVKEEYLKAELSRQLEGILKSFKDVEQKAENHVQHLQSACASSHQFQQMSRDFQAWLDTKKEEQNKSHPISAKLDVLESLIKDHKDFSKTLTAQSHMYEKTIAEGENLLLKTQGSEKAALQLQLNTIKTNWDTFNKQVKERENKLKESLEKALKYKEQVETLWPWIDKCQNNLEEIKFCLDPAEGENSIAKLKSLQKEMDQHFGMVELLNNTANSLLSVCEIDKEVVTDENKSLIQKVDMVTEQLHSKKFCLENMTQKFKEFQEVSKESKRQLQCAKEQLDIHDSLGSQAYSNKYLTMLQTQQKSLQALKHQVDLAKRLAQDLVVEASDSKGTSDVLLQVETIAQEHSTLSQQVDEKCSFLETKLQGIGHFQNTIREMFSQFAEFDDELDSMAPVGRDAETLQKQKETIKAFLKKLEALMASNDNANKTCKMMLATEETSPDLVGIKRDLEALSKQCNKLLDRAQAREEQVEGTIKRLEEFYSKLKEFSILLQKAEEHEESQGPVGMETETINQQLNMFKVFQKEEIEPLQGKQQDVNWLGQGLIQSAAKSTSTQGLEHDLDDVNARWKTLNKKVAQRAAQLQEALLHCGRFQDALESLLSWMVDTEELVANQKPPSAEFKVVKAQIQEQKLLQRLLDDRKSTVEVIKREGEKIATTAEPADKVKILKQLSLLDSRWEALLNKAETRNRQLEGISVVAQQFHETLEPLNEWLTTIEKRLVNCEPIGTQASKLEEQIAQHKALEDDIINHNKHLHQAVSIGQSLKVLSSREDKDMVQSKLDFSQVWYIEIQEKSHSRSELLQQALCNAKIFGEDEVELMNWLNEVHDKLSKLSVQDYSTEGLWKQQSELRVLQEDILLRKQNVDQALLNGLELLKQTTGDEVLIIQDKLEAIKARYKDITKLSTDVAKTLEQALQLARRLHSTHEELCTWLDKVEVELLSYETQVLKGEEASQAQMRPKELKKEAKNNKALLDSLNEVSSALLELVPWRAREGLEKMVAEDNERYRLVSDTITQKVEEIDAAILRSQQFDQAADAELSWITETEKKLMSLGDIRLEQDQTSAQLQVQKTFTMEILRHKDIIDDLVKSGHKIMTACSEEEKQSMKKKLDKVLKNYDTICQINSERYLQLERAQSLVNQFWETYEELWPWLTETQSIISQLPAPALEYETLRQQQEEHRQLRELIAEHKPHIDKMNKTGPQLLELSPGEGFSIQEKYVAADTLYSQIKEDVKKRAVALDEAISQSTQFHDKIDQILESLERIVERLRQPPSISAEVEKIKEQISENKNVSVDMEKLQPLYETLKQRGEEMIARSGGTDKDISAKAVQDKLDQMVFIWENIHTLVEEREAKLLDVMELAEKFWCDHMSLIVTIKDTQDFIRDLEDPGIDPSVVKQQQEAAETIREEIDGLQEELDIVINLGSELIAACGEPDKPIVKKSIDELNSAWDSLNKAWKDRIDKLEEAMQAAVQYQDGLQAVFDWVDIAGGKLASMSPIGTDLETVKQQIEELKQFKSEAYQQQIEMERLNHQAELLLKKVTEESDKHTVQDPLMELKLIWDSLEERIINRQHKLEGALLALGQFQHALDELLAWLTHTEGLLSEQKPVGGDPKAIEIELAKHHVLQNDVLAHQSTVEAVNKAGNDLIESSAGEEASNLQNKLEVLNQRWQNVLEKTEQRKQQLDGALRQAKGFHGEIEDLQQWLTDTERHLLASKPLGGLPETAKEQLNVHMEVCAAFEAKEETYKSLMQKGQQMLARCPKSAETNIDQDINNLKEKWESVETKLNERKTKLEEALNLAMEFHNSLQDFINWLTQAEQTLNVASRPSLILDTVLFQIDEHKVFANEVNSHREQIIELDKTGTHLKYFSQKQDVVLIKNLLISVQSRWEKVVQRLVERGRSLDDARKRAKQFHEAWSKLMEWLEESEKSLDSELEIANDPDKIKTQLAQHKEFQKSLGAKHSVYDTTNRTGRSLKEKTSLADDNLKLDDMLSELRDKWDTICGKSVERQNKLEEALLFSGQFTDALQALIDWLYRVEPQLAEDQPVHGDIDLVMNLIDNHKAFQKELGKRTSSVQALKRSARELIEGSRDDSSWVKVQMQELSTRWETVCALSISKQTRLEAALRQAEEFHSVVHALLEWLAEAEQTLRFHGVLPDDEDALRTLIDQHKEFMKKLEEKRAELNKATTMGDTVLAICHPDSITTIKHWITIIRARFEEVLAWAKQHQQRLASALAGLIAKQELLEALLAWLQWAETTLTDKDKEVIPQEIEEVKALIAEHQTFMEEMTRKQPDVDKVTKTYKRRAADPSSLQSHIPVLDKGRAGRKRFPASSLYPSGSQTQIETKNPRVNLLVSKWQQVWLLALERRRKLNDALDRLEELREFANFDFDIWRKKYMRWMNHKKSRVMDFFRRIDKDQDGKITRQEFIDGILSSKFPTSRLEMSAVADIFDRDGDGYIDYYEFVAALHPNKDAYKPITDADKIEDEVTRQVAKCKCAKRFQVEQIGDNKYRFFLGNQFGDSQQLRLVRILRSTVMVRVGGGWMALDEFLVKNDPCRAKGRTNMELREKFILADGASQGMAAFRPRGRRSRPSSRGASPNRSTSVSSQAAQAASPQVPATTTPKILHPLTRNYGKPWLTNSKMSTPCKAAECSDFPVPSAEGTPIQGSKLRLPGYLSGKGFHSGEDSGLITTAAARVRTQFADSKKTPSRPGSRAGSKAGSRASSRRGSDASDFDISEIQSVCSDVETVPQTHRPTPRAGSRPSTAKPSKIPTPQRKSPASKLDKSSKR

SEQ ID NO: 124 - protein, 4599 aa, Homo sapiens
MSEFLLALLTLSGLLPIARVLTVGADRDQQLCDPGEFLCHDHVTCVSQSWLCDGDPDCPDDSDESLDTCPEEVEIKCPLNHIACLGTNKCVHLSQLCNGVLDCPDGYDEGVHCQELLSNCQQLNCQYKCTMVRNSTRCYCEDGFEITEDGRSCKDQDECAVYGTCSQTCRNTHGSYTCSCVEGYLMQPDNRSCKAKIEPTDRPPILLIANFETIEVFYLNGSKMATLSSVNGNEIHTLDFIYNEDMICWIESRESSNQLKCIQITKAGGLTDEWTINILQSFHNVQQMAIDWLTRNLYFVDHVGDRIFVCNSNGSVCVTLIDLELHNPKAIAVDPIAGKLFFTDYGNVAKVERCDMDGMNRTRIIDSKTEQPAALALDLVNKLVYWVDLYLDYVGVVDYQGKNRHTVIQGRQVRHLYGITVFEDYLYATNSDNYNIVRINRFNGTDIHSLIKIENAWGIRIYQKRTQPTVRSHACEVDPYGMPGGCSHICLLSSSYKTRTCRCRTGFNLGSDGRSCKRPKNELFLFYGKGRPGIVRGMDLNTKIADEYMIPIENLVNPRALDFHAETNYIYFADTTSFLIGRQKIDGTERETILKDDLDNVEGIAVDWIGNNLYWTNDGHRKTINVARLEKASQSRKTLLEGEMSHPRGIVVDPVNGWMYWTDWEEDEIDDSVGRIEKAWMDGFNRQIFVTSKMLWPNGLTLDFHTNTLYWCDAYYDHIEKVFLNGTHRKIVYSGRELNHPFGLSHHGNYVFWTDYMNGSIFQLDLITSEVTLLRHERPPLFGLQIYDPRKQQGDNMCRVNNGGCSTLCLAIPGGRVCACADNQLLDENGTTCTFNPGEALPHICKAGEFRCKNRHCIQARWKCDGDDDCLDGSDEDSVNCFNHSCPDDQFKCQNNRCIPKRWLCDGANDCGSNEDESNQTCTARTCQVDQFSCGNGRCIPRAWLCDREDDCGDQTDEMASCEFPTCEPLTQFVCKSGRCISSKWHCDSDDDCGDGSDEVGCVHSCFDNQFRCSSGRCIPGHWACDGDNDCGDFSDEAQINCTKEEIHSPAGCNGNEFQCHPDGNCVPDLWRCDGEKDCEDGSDEKGCNGTIRLCDHKTKFSCWSTGRCINKAWVCDGDIDCEDQSDEDDCDSFLCGPPKHPCANDTSVCLQPEKLCNGKKDCPDGSDEGYLCDECSLNNGGCSNHCSVVPGRGIVCSCPEGLQLNKDNKTCEIVDYCSNHLKCSQVCEQHKHTVKCSCYEGWKLDVDGESCTSVDPFEAFIIFSIRHEIRRIDLHKRDYSLLVPGLRNTIALDFHFNQSLLYWTDVVEDRIYRGKLSESGGVSAIEVVVEHGLATPEGLTVDWIAGNIYWIDSNLDQIEVAKLDGSLRTTLIAGAMEHPRAIALDPRYGILFWTDWDANFPRIESASMSGAGRKTIYKDMKTGAWPNGLTVDHFEKRIVWTDARSDAIYSALYDGTNMIEIIRGHEYLSHPFAVSLYGSEVYWTDWRTNTLSKANKWTGQNVSVIQKTSAQPFDLQIYHPSRQPQAPNPCAANDGKGPCSHMCLINHNRSAACACPHLMKLSSDKKTCYEMKKFLLYARRSEIRGVDIDNPYFNFITAFTVPDIDDVTVIDFDASEERLYWTDIKTQTIKRAFINGTGLETVISRDIQSIRGLAVDWVSRNLYWISSEFDETQINVARLDGSLKTSIIHGIDKPQCLAAHPVRGKLYWTDGNTINMANMDGSNSKILFQNQKEPVGLSIDYVENKLYWISSGNGTINRCNLDGGNLEVIESMKEELTKATALTIMDKKLWWADQNLAQLGTCSKRDGRNPTILRNKTSGVVHMKVYDKEAQQGSNSCQLNNGGCSQLCLPTSETTRTCMCTVGYYLQKNRMSCQGIESFLMYSVHEGIRGIPLEPSDKMDALMPISGTSFAVGIDFHAENDTIYWTDMGFNKISRAKRDQTWKEDIITNGLGRVEGIAVDWIAGNIYWTDHGFNLIEVARLNGSFRYVIISQGLDQPRSIAVHPEKGLLFWTEWGQMPCIGKARLDGSEKVVLVSMGIAWPNGISIDYEENKLYWCDARTDKIERIDLETGGNREMVLSGSNVDMFSVAVFGAYIYWSDRAHANGSVRRGHKNDATETITMRTGLGVNLKEVKIFNRVREKGTNVCARDNGGCKQLCLYRGNSRRTCACAHGYLAEDGVTCLRHEGYLLYSGRTILKSIHLSDETNLNSPIRPYENPRYFKNVIALAFDYNQRRKGTNRIFYSDAHFGNIQLIKDNWEDRQVIVENVGSVEGLAYHRAWDTLYWTSSTTSSITRHTVDQTRPGAFDREAVITMSEDDHPHVLALDECQNLMFWTNWNEQHPSIMRSTLTGKNAQVVVSTDILTPNGLTIDYRAEKLYFSDGSLGKIERCEYDGSQRHVIVKSGPGTFLSLAVYDNYIFWSDWGRRAILRSNKYTGGDTKILRSDIPHQPMGIIAVANDTNSCELSPCALLNGGCHDLCLLTPNGRVNCSCRGDRILLEDNRCVTKNSSCNAYSEFECGNGECIDYQLTCDGIPHCKDKSDEKLLYCENRSCRRGFKPCYNRRCIPHGKLCDGENDCGDNSDELDCKVSTCATVEFRCADGTCIPRSARCNQNIDCADASDEKNCNNTDCTHFYKLGVKTTGFIRCNSTSLCVLPTWICDGSNDCGDYSDELKCPVQNKHKCEENYFSCPSGRCILNTWICDGQKDCEDGRDEFHCDSSCSWNQFACSAQKCISKHWICDGEDDCGDGLDESDSICGAITCAADMFSCQGSRACVPRHWLCDGERDCPDGSDELSTAGCAPNNTCDENAFMCHNKVCIPKQFVCDHDDDCGDGSDESPQCGYRQCGTEEFSCADGRCLLNTQWQCDGDFDCPDHSDEAPLNPKCKSAEQSCNSSFFMCKNGRCIPSGGLCDNKDDCGDGSDERNCHINECLSKKVSGCSQDCQDLPVSYKCKCWPGFQLKDDGKTCVDIDECSSGFPCSQQCINTYGTYKCLCTDGYEIQPDNPNGCKSLSDEEPFLILADHHEIRKISTDGSNYTLLKQGLNNVIAIDFDYREEFIYWIDSSRPNGSRINRMCLNGSDIKVVHNTAVPNALAVDWIGKNLYWSDTEKRIIEVSKLNGLYPTILVSKRLKFPRDLSLDPQAGYLYWIDCCEYPHIGRVGMDGTNQSVVIETKISRPMALTIDYVNRRLYWADENHIEFSNMDGSHRHKVPNQDIPGVIALTLFEDYIYWTDGKTKSLSRAHKTSGADRLSLIYSWHAITDIQVYHSYRQPDVSKHLCMINNGGCSHLCLLAPGKTHTCACPTNFYLAADNRTCLSNCTASQFRCKTDKCIPFWWKCDTVDDCGDGSDEPDDCPEFRCQPGRFQCGTGLCALPAFICDGENDCGDNSDELNCDTHVCLSGQFKCTKNQKCIPVNLRCNGQDDCGDEEDERDCPENSCSPDYFQCKTTKHCISKLWVCDEDPDCADASDEANCDKKTCGPHEFQCKNNNCIPDHWRCDSQNDCSDNSDEENCKPQTCTLKDFLCANGDCVSSRFWCDGDFDCADGSDERNCETSCSKDQFRCSNGQCIPAKWKCDGHEDCKYGEDEKSCEPASPTCSSREYICASDGCISASLKCNGEYDCADGSDEMDCVTECKEDQFRCKNKAHCIPIRWLCDGIHDCVDGSDEENCERGGNICRADEFLCNNSLCKLHFWVCDGEDDCGDNSDEAPDMCVKFLCPSTRPHRCRNNRICLQSEQMCNGIDECGDNSDEDHCGGKLTYKARPCKKDEFACSNKKCIPMDLQCDRLDDCGDGSDEQGCRIAPTEYTCEDNVNPCGDDAYCNQIKTSVFCRCKPGFQRNMKNRQCEDLNECLVFGTCSHQCINVEGSYKCVCDQNFQERNNTCIAEGSEDQVLYIANDTDILGFIYPFNYSGDHQQISHIEHNSRITGMDVYYQRDMIIWSTQFNPGGIFYKRIHGREKRQANSGLICPEFKRPRDIAVDWVAGNIYWTDHSRMHWFSYYTTHWTSLRYSINVGQLNGPNCTRLLTNMAGEPYAIAVNPKRGMMYWTVVGDHSHIEEAAMDGTLRRILVQKNLQRPTGLAVDYFSERIYWADFELSIIGSVLYDGSNSVVSVSSKQGLLHPHRIDIFEDYIYGAGPKNGVFRVQKFGHGSVEYLALNIDKTKGVLISHRYKQLDLPNPCLDLACEFLCLLNPSGATCVCPEGKYLINGTCNDDSLLDDSCKLTCENGGRCILNEKGDLRCHCWPSYSGERCEVNHCSNYCQNGGTCVPSVLGRPTCSCALGFTGPNCGKTVCEDFCQNGGTCIVTAGNQPYCHCQPEYTGDRCQYYVCHHYCVNSESCTIGDDGSVECVCPTRYEGPKCEVDKCVRCHGGHCIINKDSEDIFCNCTNGKIASSCQLCDGYCYNGGTCQLDPETNVPVCLCSTNWSGTQCERPAPKSSKSDHISTRSIAIIVPLVLLVTLITTLVIGLVLCKRKRRTKTIRRQPIINGGINVEIGNPSYNMYEVDHDHNDGGLLDPGFMIDPTKARYIGGGPSAFKLPHTAPPIYLNSDLKGPLTAGPTNYSNPVYAKLYMDGQNCRNSLGSVDERKELLPKKIEIGIRETVA

SEQ ID NO: 125 - protein, 3703 aa, Homo sapiens
MEGCDSPVVSGKDNGCGIPQHQQWTELNSTHLPDKPSSMEQSTGESHGPLDSLRAPFNERLAESTASAGPPSEPASKEVTCNECSASFASLQTYMEHHCPSARPPPPLREESASDTGEEGDEESDVENLAGEIVYQPDGSAYIVESLSQLTQGGGACGSGSGSGPLPSLFLNSLPGAGGKQGDPSCAAPVYPQIINTFHIASSFGKWFEGPDQAFPNTSALAGLSPVLHSFRVFDVRHKSNKDYLNSDGSAKSSCVSKDVPNNVDLSKFDGFVLYGKRKPILMCFLCKLSFGYVRSFVTHAVHDHRMTLSEDERKILSNKNISAIIQGIGKDKEPLVSFLEPKNKNFQHPLVSTANLIGPGHSFYGKFSGIRMEGEEALPAGSAAGPEQPQAGLLTPSTLLNLGGLTSSVLKTPITSVPLGPLASSPTKSSEGKDSGAAEGEKQEVGDGDCFSEKVEPAEEEAEEEEEEEEAEEEEEEEEEEEEEEEDEGCKGLFPSELDEELEDRPHEEPGAAAGSSSKKDLALSNQSISNSPLMPNVLQTLSRGTASTSSNSASSFVVFDGANRRNRLSFNSEGVRANVAEGGRRLDFADESANKDNATAPEPNESTEGDDGGFVPHHQHAGSLCELGVGECPSGSGVECPKCDTVLGSSRSLGGHMTMMHSRNSCKTLKCPKCNWHYKYQQTLEAHMKEKHPEPGGSCVYCKSGQPHPRLARGESYTCGYKPFRCEVCNYSTTTKGNLSIHMQSDKHLNNMQNLQNGGGEQVFSHTAGAAAAAVAAAAAAANISSSCGAPSPTKPKTKPTWRCEVCDYETNVARNLRIHMTSEKHMHNMMLLQQNMTQIQHNRHLGLGSLPSPAEAELYQYYLAQNMNLPNLKMDSAASDAQFMMSGFQLDPAGPMAAMTPALVGGEIPLDMRLGGGQLVSEELMNLGESFIQTNDPSLKLFQCAVCNKFTTDNLDMLGLHMNVERSLSEDEWKAVMGDSYQCKLCRYNTQLKANFQLHCKTDKHVQKYQLVAHIKEGGKANEWRLKCVAIGNPVHLKCNACDYYTNSLEKLRLHTVNSRHEASLKLYKHLQQHESGVEGESCYYHCVLCNYSTKAKLNLIQHVRSMKHQRSESLRKLQRLQKGLPEEDEDLGQIFTIRRCPSTDPEEAIEDVEGPSETAADPEELAKDQEGGASSSQAEKELTDSPATSKRISFPGSSESPLSSKRPKTAEEIKPEQMYQCPYCKYSNADVNRLRVHAMTQHSVQPMLRCPLCQDMLNNKIHLQLHLTHLHSVAPDCVEKLIMTVTTPEMVMPSSMFLPAAVPDRDGNSNLEEAGKQPETSEDLGKNILPSASTEQSGDLKPSPADPGSVREDSGFICWKKGCNQVFKTSAALQTHFNEVHAKRPQLPVSDRHVYKYRCNQCSLAFKTIEKLQLHSQYHVIRAATMCCLCQRSFRTFQALKKHLETSHLELSEADIQQLYGGLLANGDLLAMGDPTLAEDHTIIVEEDKEEESDLEDKQSPTGSDSGSVQEDSGSEPKRALPFRKGPNFTMEKFLDPSRPYKCTVCKESFTQKNILLVHYNSVSHLHKLKRALQESATGQPEPTSSPDNKPFKCNTCNVAYSQSSTLEIHMRSVLHQTKARAAKLEAASGSSNGTGNSSSISLSSSTPSPVSTSGSNTFTTSNPSSAGIAPSSNLLSQVPTESVGMPPLGNPIGANIASPSEPKEANRKKLADMIASRQQQQQQQQQQQQQQQQQQQAQTLAQAQAQVQAHLQQELQQQAALIQSQLFNPTLLPHFPMTTETLLQLQQQQHLLFPFYIPSAEFQLNPEVSLPVTSGALTLTGTGPGLLEDLKAQVQVPQQSHQQILPQQQQNQLSIAQSHSALLQPSQHPEKKNKLVIKEKEKESQRERDSAEGGEGNTGPKETLPDALKAKEKKELAPGGGSEPSMLPPRIASDARGNATKALLENFGFELVIQYNENKQKVQKKNGKTDQGENLEKLECDSCGKLFSNILILKSHQEHVHQNYFPFKQLERFAKQYRDHYDKLYPLRPQTPEPPPPPPPPPPPPLPAAPPQPASTPAIPASAPPITSPTIAPAQPSVPLTQLSMPMELPIFSPLMMQTMPLQTLPAQLPPQLGPVEPLPADLAQLYQHQLNPTLLQQQNKRPRTRITDDQLRVLRQYFDINNSPSEEQIKEMADKSGLPQKVIKHWFRNTLFKERQRNKDSPYNFSNPPITSLEELKIDSRPPSPEPPKQEYWGSKRSSRTRFTDYQLRVLQDFFDANAYPKDDEFEQLSNLLNLPTRVIVVWFQNARQKARKNYENQGEGKDGERRELTNDRYIRTSNLNYQCKKCSLVFQRIFDLIKHQKKLCYKDEDEEGQDDSQNEDSMDAMEILTPTSSSCSTPMPSQAYSAPAPSANNTASSAFLQLTAEAEELATFNSKTEAGDEKPKLAEAPSAQPNQTQEKQGQPKPELQQQEQPEQKTNTPQQKLPQLVSLPSLPQPPPQAPPPQCPLPQSSPSPSQLSHLPLKPLHTSTPQQLANLPPQLIPYQCDQCKLAFPSFEHWQEHQQLHFLSAQNQFIHPQFLDRSLDMPFMLFDPSNPLLASQLLSGAIPQIPASSATSPSTPTSTMNTLKRKLEEKASASPGENDSGTGGEEPQRDKRLRTTITPEQLEILYQKYLLDSNPTRKMLDHIAHEVGLKKRVVQVWFQNTRARERKGQFRAVGPAQAHRRCPFCRALFKAKTALEAHIRSRHWHEAKRAGYNLTLSAMLLDCDGGLQMKGDIFDGTSFSHLPPSSSDGQGVPLSPVSKTMELSPRTLLSPSSIKVEGIEDFESPSMSSVNLNFDQTKLDNDDCSSVNTAITDTTTGDEGNADNDSATGIATETKSSSAPNEGLTKAAMMAMSEYEDRLSSGLVSPAPSFYSKEYDNEGTVDYSETSSLADPCSPSPGASGSAGKSGDSGDRPGQKRFRTQMTNLQLKVLKSCFNDYRTPTMLECEVLGNDIGLPKRVVQVWFQNARAKEKKSKLSMAKHFGINQTSYEGPKTECTLCGIKYSARLSVRDHIFSQQHISKVKDTIGSQLDKEKEYFDPATVRQLMAQQELDRIKKANEVLGLAAQQQGMFDNTPLQALNLPTAYPALQGIPPVLLPGLNSPSLPGFTPSNTALTSPKPNLMGLPSTTVPSPGLPTSGLPNKPSSASLSSPTPAQATMAMGPQQPPQQQQQQQQPQVQQPPPPPAAQPPPTPQLPLQQQQQRKDKDSEKVKEKEKAHKGKGEPLPVPKKEKGEAPTATAATISAPLPTMEYAVDPAQLQALQAALTSDPTALLTSQFLPYFVPGFSPYYAPQIPGALQSGYLQPMYGMEGLFPYSPALSQALMGLSPGSLLQQYQQYQQSLQEAIQQQQQRQLQQQQQQKVQQQQPKASQTPVPPGAPSPDKDPAKESPKPEEQKNTPREVSPLLPKLPEEPEAESKSADSLYDPFIVPKVQYKLVCRKCQAGFSDEEAARSHLKSLCFFGQSVVNLQEMVLHVPTGGGGGGSGGGGGGGGGGGGGGSYHCLACESALCGEEALSQHLESALHKHRTITRAARNAKEHPSLLPHSACFPDPSTASTSQSAAHSNDSPPPPSAAAPSSASPHASRKSWPQVVSRASAAKPPSFPPLSSSSTVTSSSCSTSGVQPSMPTDDYSEESDTDLSQKSDGPASPVEGPKDPSCPKDSGLTSVGTDTFRL

SEQ ID NO: 126 - protein, 4284 aa, Homo sapiens
MGLLLVFPLIQSQSRTDPSLCNITAEVLLNCLRDCQPLSLTKEPADCLNGIETLLCSWLEETSDTGRHIPHKQKENAAAALVALACARGSLKTFVHTVHLLQKQTDLGSLPVADVLYRLLLLEGGPGSPSCLLGGKHIVSWGYEDMLPAPDSNTGSSSENKDADLGRCLTADGLYLYTTNSVGRGVSKLGSGLHGTLRGFVYCRNEELEPGWVAFGSGSLLHRPVSFDNKPHSLFQVIDQNTLQVCQVVPMPANHLPIGSTMSTVHLSSDGTYFYWIWSPASLNEKTPKGHSVFMDIFELVVENGVFVANPLQERTILMRKEGESAKSINEMLLSRLSRYRASPSATLAALTGSTISNTLKEDQAANTSCGLPLKMLRKTPIYTCGTYLVMLVPPPGGSGSSATRSLFGGTSGLSSLKILASSLVYNISDGQFTSRADLIDAAGSSLGRGALVPGLGACYDTVNNMLWTCSNDYIDQWCNPGNQAFHYVCQRLGVSHIITEPKEEAITTNEVINQLLHHVGAMCIHQLNLLATNPNLPITSVLGKQHPIEAHHLSSICDIMEKAMVNGDTCIIRCILVVFQVVFKFFFSPQTERNRDIIRRSGLLLWQLLMAPKDQICPEIQKEVCLAISSGLNILYPGETEINNLLKLVLTEGERNSGLSQLRDVILTNLAEQLQNNRFGSDEDDHYRLNDELLHYILKIVVRESCILITKCQTVSKDDFQKLLSTVPAASSCLRYLMAVQNHLLSNTILIKPDENDDSDSSLQGETLKVQELKVSILALATQILTGCDEVLEMLQQVTTALINSDIADREQRLKGLEQVTKATMLGHLLPVLLTSLMHPNLQTLIMADALMPQLVQLVLYTSQTALLLKTQCPVFAEVGCSPCGAPDQKCRLFPDERMLEEKEEPGFLTGLKIPAPWAAGKTVETVHPVRDNYKFKETVHIPGARCLYLRFDSRCSSQYDYDKLVIYAGPNTNSRKVAEYGGNTLGYGSRSVLGTGWPKDLVKCISPPSLNFKVEGDTVTFSFEMRSGREHNTPDKAMWGFACTVRAQESSEDVSGGLPFLVDLALGLSVLACSMLRILYNGPEITKEEEACQELLRSKLLQRCQWQVEANGVISPALTPSPSPLPLTIEEDREFTYPSDVLVPPVGNYFDLPRIRLPPGIMIKLREISGRARPQFRPSIKEVIQPDVMEEMVVSCVIKHLNLVDALQSLINFQYQEEHAEEYDLLCKIMGETFKKLNAMERQLQSVAELEQKWQSEVDDAMQGKLENNMPFFYDYHFNENKMKELELLCSMKEVSFDGNDLENMVLSLREKFLQEVNSLIQKPSHPLAKTKTLVKSLMNRAELLLHVTIAAQSGLTRSISGTPAETPACKSASETKVISHAVRQPVFLRSMSAPSDLEMIGNEDLEFTRANQRRRHVTSHRSSSFTLLQSLAIEDSRDKPTYSVLLGQLFAFIGTNPDQAVSSSSFLLAAQTRWRRGNTRKQALVHMRELLTAAVRVGGVTHLVGPVTMVLQGGPRIEELTCGGMVEQVQEAFGETMTSVVSLCARYPIACANSIGLLCTIPYTRSEEKCLVRSGLVQLMDRLCSLSNQTESSSSEKQTKKQKVATMAWAAFQVLANRCVEWEKEEGGSTEAVHSGLARQVSSLLTNHLARATECCGNQAAGNDALQDVLSLLNDLSRSHIGKAILSQPACVSKLLSLLLDQRPSPKLVLIILQLCRAALPLMSVEDCGNVELPPWSYSVPSLNSEQEDPSDPASKIASLLLAKLADYVVPGCQTVLSPTASEPDTTLTKTSPKNSLKGDKDPGEESEAVDGKLSIFIHKREDQSSHEVLQPLLSSSEGRPFRLGTGANMEKVVKMDRDMTKGGCCEVITEEAAAALRKATKWAQSGLIVSIGPPVESINPETVSGLSTGDKKKTAQTSICRERNSELARTDPVRPFISGHVANSMAAEVIALLHSLLMAPESNAAQIWTTTAEKVLSRALMYIPQLGKYAESILENGSSSGRKLAKLQRIARQAVAALCALGGFKETIKIGSEVQVLGRGISGSIGVVASINEQEGIATVRFPPIDCRKTSQASDTLTIPLSRLCVPRSEALPLHKLSITEKVVQAVQSMLLPQEGSLSIHTSLPATGDGSAPVMAVVRLLAEIRTRACLVMAQLLEDSLFCEEFIQQCPAAVEVLNLVAQECSAGERLAVVEVQCERLRMLYRDCARPPPPPLQADRRQPKEITWSPSRVFPPVRACMFSSHLTSVTFLADPSAGGGLPRGTFIYATSPLPVQAPSFYWEIEIVSYGDTDDDTGPIVSFGFTTEAEKRDGAWTNPVGTCLFHNNGRAVHYNGSSLLQWKSVRLDVTLSPGDVAGIGWERTEGTPPPPGQPAKGRVYFTYCGQRLSPYLEDVSGGMWPVVHIQKKNTKTRANFGSRPFAYAEGQAHRNAADLCTDLAEEISANFEALPFAMASDSDNDAGTSIASDPGTHGPPCRIAAVATAQQQYDSDTSCHYKVELSYENFITSGPDPHPPPIADDESDDDDDDDIPQEDHYALLVKAWETKVFPTIRRRFRNEAERKSGLDQIKGALQLGMVDIARQTVEFLYEENGGIPRDLYLPTIEDIKDEANKFTIDKVRKGLTVVTRSPDSNNVASSAVGTALPKFAIRGMLKTFGLHGVVLDVDSVNELVQVETYLRSEGVLVRYWYPIDMLERPPAGYRRTATNGLVTLDNTNLQIHRELLRCEAALARLYCRMALLNIFAPKLPHLFTRLFHIPAIRDITLEHLQLLSNQLLAPPLPDGTISSSSILLAQSLQHCIHSQNCSATDLFYQGNSQTVREWLNVAITRTLHQGEESLLELTKQICSFLQTAPEQFPSEEFPISESKVNMDVNFPGAAFVVVSCKESQSGFRKDSSLYKAPWARVLVYGLGHKVKRNGQLNLIEAACYPRDASPANTGLAPPPTADQYPSVVLSTDRVHIKLGVSPPPGAVLVLHSLPLEFPLAMAFAEQLLSWKSEDSEGKSEDEPDTIPTSVLLQVVELLGNFLWTTDMAACVKELVFHLLAELLRTVHTLEQRRHPAGLSSSIALQLNPCLAMLMALQSELHKLYDEETQNWVSGGACGGSGGAAAGDQGRFSTYFHALMEGCLAVAEVTLPTNMSVTASGVTSATAPNLSDSSSSSSSSPGQTPQSPSLLSKRKKVKMKREKASSSGKRQSSRTVDSDPTVLSIGGSKPEDMLWFHRALTLLIILRHLTRKDPQGLGVTSDAIADACQALVGPTAHSRLLVISGIPTHLDEGVVRGAIRKACNAHGGVFKDEIYIPLQEEDTKKPKDKAEGGDGKVEPEKTLAFPGTDSMEVSTSSSLTPAMSISASASTSQASICSSQGISQTVSDLSVDPLPAGLELPIPPGLLEPHAVSSQESLDISLCSTGSLGSLGSLGEPLDNAETASVSDMGSMYTVTSLDNQPLAARPIKGFAVVEIRSRAKIEKIRASLFNNNDLIGLSSLDGEDELMEMSTEEILTVSVVNQSLFDTQGSPGLEDYFNDKSIKGEKLVPGAREVLTEIFKSCAHSEQTLSLTPAKPIRVSDIYLSKEQINSQTPGNLLHLFFTNVRPPKKVLEDQLTQILRKYGVPKPKFDKSKYSKAGKEQHPVKVVSTKRPITKPPAKDKAVLNSVSRTALSEKKPTVKPKSPEKSKPDEKDPEKSPTKKQEVPEEKYLTLEGFHKFVIDRARQDIRSVWRAILSCGYDLHFERCACIDVRHAQKASRKWTLEMDVALVQYINQLCRHLAITPARLHPHEVYLDPADAADPRVACLLNVPIESLRLRFALLQSLNTTLETFFLPLVELRQTPMYTHSIAALLKEAKGLIFYDTKVTVMNRVLNATVQRTADHAAPEITLDPLEIVGGEIRASENSYFCQAARQLASVPSSQLCVKLASGGDPTYAFNIRFTGEEVHGTSGSFRHFLWQVCKELQSSSLSLLLLCPSSAVNKNKGKYILTPSPITYGEEQLLHFLGQLLGIAIRADVPLPLDLLPSFWKTLVGEPLDPEQDLQEADILTYNYVKKFESINDETELEALCAEIASQHLATESPDSPNKPCCRFTYLTMTGEEVELCSRGRHILVAWENKDIYAAAIRSLRLRELQNVECVTAVRAGLGSIIPLQLLTMLSPLEMELRTCGLPYINLEFLKAHTMYQVGLMETDQHIEFFWGALEMFTQEELCKFIKFACNQERIPFTCPCKDGGPDTAHVPPYPMKIAPPDGTAGSPDSRYIRVETCMFMIKLPQYSSLEIMLEKLRCAIHYREDPLSG

SEQ ID NO: 127 - protein, 6669 aa, Homo sapiens
MADDEDYEEVVEYYTEEVVYEEVPGETITKIYETTTTRTSDYEQSETSKPALAQPALAQPASAKPVERRKVIRKKVDPSKFMTPYIAHSQKMQDLFSPNKYKEKFEKTKGQPYASTTDTPELRRIKKVQDQLSEVKYRMDGDVAKTICHVDEKAKDIEHAKKVSQQVSKVLYKQNWEDTKDKYLLPPDAPELVQAVKNTAMFSKKLYTEDWEADKSLFYPYNDSPELRRVAQAQKALSDVAYKKGLAEQQAQFTPLADPPDIEFAKKVTNQVSKQKYKEDYENKIKGKWSETPCFEVANARMNADNISTRKYQEDFENMKDQIYFMQTETPEYKMNKKAGVAASKVKYKEDYEKNKGKADYNVLPASENPQLRQLKAAGDALSDKLYKENYEKTKAKSINYCETPKFKLDTVLQNFSSDKKYKDSYLKDILGHYVGSFEDPYHSHCMKVTAQNSDKNYKAEYEEDRGKGFFPQTITQEYEAIKKLDQCKDHTYKVHPDKTKFTQVTDSPVLLQAQVNSKQLSDLNYKAKHESEKFKCHIPPDTPAFIQHKVNAYNLSDNLYKQDWEKSKAKKFDIKVDAIPLLAAKANTKNTSDVMYKKDYEKNKGKMIGVLSINDDPKMLHSLKVAKNQSDRLYKENYEKTKAKSMNYCETPKYQLDTQLKNFSEARYKDLYVKDVLGHYVGSMEDPYHTHCMKVAAQNSDKSYKAEYEEDKGKCYFPQTITQEYEAIKKLDQCKDHTYKVHPDKTKFTAVTDSPVLLQAQLNTKQLSDLNYKAKHEGEKFKCHIPADAPQFIQHRVNAYNLSDNVYKQDWEKSKAKKFDIKVDAIPLLAAKANTKNTSDVMYKKDYEKSKGKMIGALSINDDPKMLHSLKTAKNQSDREYRKDYEKSKTIYTAPLDMLQVTQAKKSQAIASDVDYKHILHSYSYPPDSINVDLAKKAYALQSDVEYKADYNSWMKGCGWVPFGSLEMEKAKRASDILNEKKYRQHPDTLKFTSIEDAPITVQSKINQAQRSDIAYKAKGEEIIHKYNLPPDLPQFIQAKVNAYNISENMYKADLKDLSKKGYDLRTDAIPIRAAKAARQAASDVQYKKDYEKAKGKMVGFQSLQDDPKLVHYMNVAKIQSDREYKKDYEKTKSKYNTPHDMFNVVAAKKAQDVVSNVNYKHSLHHYTYLPDAMDLELSKNMMQIQSDNVYKEDYNNWMKGIGWIPIGSLDVEKVKKAGDALNEKKYRQHPDTLKFTSIVDSPVMVQAKQNTKQVSDILYKAKGEDVKHKYTMSPDLPQFLQAKCNAYNISDVCYKRDWHDLIAKGNNVLGDAIPITAAKASRNIASDYKYKEAYEKSKGKHVGFRSLQDDPKLVHYMNVAKLQSDREYKKNYENTKTSYHTPGDMVSITAAKMAQDVATNVNYKQPLHHYTYLPDAMSLEHTRNVNQIQSDNVYKDEYNSFLKGIGWIPIGSLEVEKVKKAGDALNERKYRQHPDTVKFTSVPDSMGMVLAQHNTKQLSDLNYKVEGEKLKHKYTIDPELPQFIQAKVNALNMSDAHYKADWKKTIAKGYDLRPDAIPIVAAKSSRNIASDCKYKEAYEKAKGKQVGFLSLQDDPKLVHYMNVAKIQSDREYKKGYEASKTKYHTPLDMVSVTAAKKSQEVATNANYRQSYHHYTLLPDALNVEHSRNAMQIQSDNLYKSDFTNWMKGIGWVPIESLEVEKAKKAGEILSEKKYRQHPEKLKFTYAMDTMEQALNKSNKLNMDKRLYTEKWNKDKTTIHVMPDTPDILLSRVNQITMSDKLYKAGWEEEKKKGYDLRPDAIAIKAARASRDIASDYKYKKAYEQAKGKHIGFRSLEDDPKLVHFMQVAKMQSDREYKKGYEKSKTSFHTPVDMLSVVAAKKSQEVATNANYRNVIHTYNMLPDAMSFELAKNMMQIQSDNQYKADYADFMKGIGWLPLGSLEAEKNKKAMEIISEKKYRQHPDTLKYSTLMDSMNMVLAQNNAKIMNEHLYKQAWEADKTKVHIMPDIPQIILAKANAINMSDKLYKLSLEESKKKGYDLRPDAIPIKAAKASRDIASDYKYKYNYEKGKGKMVGFRSLEDDPKLVHSMQVAKMQSDREYKKNYENTKTSYHTPADMLSVTAAKDAQANITNTNYKHLIHKYILLPDAMNIELTRNMNRIQSDNEYKQDYNEWYKGLGWSPAGSLEVEKAKKATEYASDQKYRQHPSNFQFKKLTDSMDMVLAKQNAHTMNKHLYTIDWNKDKTKIHVMPDTPDILQAKQNQTLYSQKLYKLGWEEALKKGYDLPVDAISVQLAKASRDIASDYKYKQGYRKQLGHHVGFRSLQDDPKLVLSMNVAKMQSEREYKKDFEKWKTKFSSPVDMLGVVLAKKCQELVSDVDYKNYLHQWTCLPDQNDVVQAKKVYELQSENLYKSDLEWLRGIGWSPLGSLEAEKNKRASEIISEKKYRQPPDRNKFTSIPDAMDIVLAKTNAKNRSDRLYREAWDKDKTQIHIMPDTPDIVLAKANLINTSDKLYRMGYEELKRKGYDLPVDAIPIKAAKASREIASEYKYKEGFRKQLGHHIGARNIEDDPKMMWSMHVAKIQSDREYKKDFEKWKTKFSSPVDMLGVVLAKKCQTLVSDVDYKNYLHQWTCLPDQSDVIHARQAYDLQSDNLYKSDLQWLKGIGWMTSGSLEDEKNKRATQILSDHVYRQHPDQFKFSSLMDSIPMVLAKNNAITMNHRLYTEAWDKDKTTVHIMPDTPEVLLAKQNKVNYSEKLYKLGLEEAKRKGYDMRVDAIPIKAAKASRDIASEFKYKEGYRKQLGHHIGARAIRDDPKMMWSMHVAKIQSDREYKKDFEKWKTKFSSPVDMLGVVLAKKCQTLVSDVDYKNYLHQWTCLPDQSDVIHARQAYDLQSDNMYKSDLQWMRGIGWVSIGSLDVEKCKRATEILSDKIYRQPPDRFKFTSVTDSLEQVLAKNNALNMNKRLYTEAWDKDKTQIHIMPDTPEIMLARQNKINYSETLYKLANEEAKKKGYDLRSDAIPIVAAKASRDVISDYKYKDGYRKQLGHHIGARNIEDDPKMMWSMHVAKIQSDREYKKDFEKWKTKFSSPVDMLGVVLAKKCQTLVSDVDYKNYLHEWTCLPDQNDVIHARQAYDLQSDNIYKSDLQWLRGIGWVPIGSMDVVKCKRAAEILSDNIYRQPPDKLKFTSVTDSLEQVLAKNNALNMNKRLYTEAWDKDKTQVHIMPDTPEIMLARQNKINYSESLYRQAMEEAKKEGYDLRSDAIPIVAAKASRDIASDYKYKEAYRKQLGHHIGARAVHDDPKIMWSLHIAKVQSDREYKKDFEKYKTRYSSPVDMLGIVLAKKCQTLVSDVDYKHPLHEWICLPDQNDIIHARKAYDLQSDNLYKSDLEWMKGIGWVPIDSLEVVRAKRAGELLSDTIYRQRPETLKFTSITDTPEQVLAKNNALNMNKRLYTEAWDNDKKTIHVMPDTPEIMLAKLNRINYSDKLYKLALEESKKEGYDLRLDAIPIQAAKASRDIASDYKYKEGYRKQLGHHIGARNIKDDPKMMWSIHVAKIQSDREYKKEFEKWKTKFSSPVDMLGVVLAKKCQILVSDIDYKHPLHEWTCLPDQNDVIQARKAYDLQSDAIYKSDLEWLRGIGWVPIGSVEVEKVKRAGEILSDRKYRQPADQLKFTCITDTPEIVLAKNNALTMSKHLYTEAWDADKTSIHVMPDTPDILLAKSNSANISQKLYTKGWDESKMKDYDLRADAISIKSAKASRDIASDYKYKEAYEKQKGHHIGAQSIEDDPKIMCAIHAGKIQSEREYKKEFQKWKTKFSSPVDMLSILLAKKCQTLVTDIDYRNYLHEWTCMPDQNDIIQAKKAYDLQSDALYKADLEWLRGIGWMPQGSPEVLRVKNAQNIFCDSVYRTPVVNLKYTSIVDTPEVVLAKSNAENISIPKYREVWDKDKTSIHIMPDTPEINLARANALNVSNKLYREGWDEMKAGCDVRLDAIPIQAAKASREIASDYKYKLDHEKQKGHYVGTLTARDDNKIRWALIADKLQNEREYRLDWAKWKAKIQSPVDMLSILHSKNSQALVSDMDYRNYLHQWTCMPDQNDVIQAKKAYELQSDNVYKADLEWLRGIGWMPNDSVSVNHAKHAADIFSEKKYRTKIETLNFTPVDDRVDYVTAKQSGEILDDIKYRKDWNATKSKYTLTETPLLHTAQEAARILDQYLYKEGWERQKATGYILPPDAVPFVHAHHCNDVQSELKYKAEHVKQKGHYVGVPTMRDDPKLVWFEHAGQIQNERLYKEDYHKTKAKINIPADMVSVLAAKQGQTLVSDIDYRNYLHQWMCHPDQNDVIQARKAYDLQSDNVYRADLEWLRGIGWIPLDSVDHVRVTKNQEMMSQIKYKKNALENYPNFRSVVDPPEIVLAKINSVNQSDVKYKETFNKAKGKYTFSPDTPHISHSKDMGKLYSTILYKGAWEGTKAYGYTLDERYIPIVGAKHADLVNSELKYKETYEKQKGHYLAGKVIGEFPGVVHCLDFQKMRSALNYRKHYEDTKANVHIPNDMMNHVLAKRCQYILSDLEYRHYFHQWTSLLEEPNVIRVRNAQEILSDNVYKDDLNWLKGIGCYVWDTPQILHAKKSYDLQSQLQYTAAGKENLQNYNLVTDTPLYVTAVQSGINASEVKYKENYHQIKDKYTTVLETVDYDRTRNLKNLYSSNLYKEAWDRVKATSYILPSSTLSLTHAKNQKHLASHIKYREEYEKFKALYTLPRSVDDDPNTARCLRVGKLNIDRLYRSVYEKNKMKIHIVPDMVEMVTAKDSQKKVSEIDYRLRLHEWICHPDLQVNDHVRKVTDQISDIVYKDDLNWLKGIGCYVWDTPEILHAKHAYDLRDDIKYKAHMLKTRNDYKLVTDTPVYVQAVKSGKQLSDAVYHYDYVHSVRGKVAPTTKTVDLDRALHAYKLQSSNLYKTSLRTLPTGYRLPGDTPHFKHIKDTRYMSSYFKYKEAYEHTKAYGYTLGPKDVPFVHVRRVNNVTSERLYRELYHKLKDKIHTTPDTPEIRQVKKTQEAVSELIYKSDFFKMQGHMISLPYTPQVIHCRYVGDITSDIKYKEDLQVLKGFGCFLYDTPDMVRSRHLRKLWSNYLYTDKARKMRDKYKVVLDTPEYRKVQELKTHLSELVYRAAGKKQKSIFTSVPDTPDLLRAKRGQKLQSQYLYVELATKERPHHHAGNQTTALKHAKDVKDMVSEKKYKIQYEKMKDKYTPVPDTPILIRAKRAYWNASDLRYKETFQKTKGKYHTVKDALDIVYHRKVTDDISKIKYKENYMSQLGIWRSIPDRPEHFHHRAVTDTVSDVKYKEDLTWLKGIGCYAYDTPDFTLAEKNKTLYSKYKYKEVFERTKSDFKYVADSPINRHFKYATQLMNEKKYRADYEQRKDKYHLVVDEPRHLLAKTAGDQISQIKYRKNYEKSKDKFTSIVDTPEHLRTTKVNKQISDILYKLEYNKAKPRGYTTIHDTPMLLHVRKVKDEVSDLKYKEVYQRNKSNCTIEPDAVHIKAAKDAYKVNTNLDYKKQYEANKAHWKWTPDRPDFLQAAKSSLQQSDFEYKLDREFLKGCKLSVTDDKNTVLALRNTLIESDLKYKEKHVKERGTCHAVPDTPQILLAKTVSNLVSENKYKDHVKKHLAQGSYTTLPETRDTVHVKEVTKHVSDTNYKKKFVKEKGKSNYSIMLEPPEVKHAMEVAKKQSDVAYRKDAKENLHYTTVADRPDIKKATQAAKQASEVEYRAKHRKEGSHGLSMLGRPDIEMAKKAAKLSSQVKYRENFDKEKGKTPKYNPKDSQLYKVMKDANNLASEVKYKADLKKLHKPVTDMKESLIMNHVLNTSQLASSYQYKKKYEKSKGHYHTIPDNLEQLHLKEATELQSIVKYKEKYEKERGKPMLDFETPTYITAKESQQMQSGKEYRKDYEESIKGRNLTGLEVTPALLHVKYATKIASEKEYRKDLEESIRGKGLTEMEDTPDMLRAKNATQILNEKEYKRDLELEVKGRGLNAMANETPDFMRARNATDIASQIKYKQSAEMEKANFTSVVDTPEIIHAQQVKNLSSQKKYKEDAEKSMSYYETVLDTPEIQRVRENQKNFSLLQYQCDLKNSKGKITVVQDTPEILRVKENQKNFSSVLYKEDVSPGTAIGKTPEMMRVKQTQDHISSVKYKEAIGQGTPIPDLPEVKRVKETQKHISSVMYKENLGTGIPTTVTPEIERVKRNQENFSSVLYKENLGKGIPTPITPEMERVKRNQENFSSVLYKENMGKGTPLAVTPEMERVKHNQENISSVLYKENVGKATATPVTPEMQRVKRNQENISSVLYKENLGKATPTPFTPEMERVKRNQENFSSVLYKENMRKATPTPVTPEMERAKRNQENISSVLYSDSFRKQIQGKAAYVLDTPEMRRVRETQRHISTVKYHEDFEKHKGCFTPVVTDPITERVKKNMQDFSDINYRGIQRKVVEMEQKRNDQDQETITGLRVWRTNPGSVFDYDPAEDNIQSRSLHMINVQAQRRSREQSRSASALSISGGEEKSEHSEAPDHHLSTYSDGGVFAVSTAYKHAKTTELPQQRSSSVATQQTTVSSIPSHPSTAGKIFRAMYDYMAADADEVSFKDGDAIINVQAIDEGWMYGTVQRTGRTGMLPANYVEAI

SEQ ID NO: 128 - protein, 3122 aa, Homo sapiens
MPGAAGVLLLLLLSGGLGGVQAQRPQQQRQSQAHQQRGLFPAVLNLASNALITTNATCGEKGPEMYCKLVEHVPGQPVRNPQCRICNQNSSNPNQRHPITNAIDGKNTWWQSPSIKNGIEYHYVTITLDLQQVFQIAYVIVKAANSPRPGNWILERSLDDVEYKPWQYHAVTDTECLTLYNIYPRTGPPSYAKDDEVICTSFYSKIHPLENGEIHISLINGRPSADDPSPELLEFTSARYIRLRFQRIRTLNADLMMFAHKDPREIDPIVTRRYYYSVKDISVGGMCICYGHARACPLDPATNKSRCECEHNTCGDSCDQCCPGFHQKPWRAGTFLTKTECEACNCHGKAEECYYDENVARRNLSLNIRGKYIGGGVCINCTQNTAGINCETCTDGFFRPKGVSPNYPRPCQPCHCDPIGSLNEVCVKDEKHARRGLAPGSCHCKTGFGGVSCDRCARGYTGYPDCKACNCSGLGSKNEDPCFGPCICKENVEGGDCSRCKSGFFNLQEDNWKGCDECFCSGVSNRCQSSYWTYGKIQDMSGWYLTDLPGRIRVAPQQDDLDSPQQISISNAEARQALPHSYYWSAPAPYLGNKLPAVGGQLTFTISYDLEEEEEDTERVLQLMIILEGNDLSISTAQDEVYLHPSEEHTNVLLLKEESFTIHGTHFPVRRKEFMTVLANLKRVLLQITYSFGMDAIFRLSSVNLESAVSYPTDGSIAAAVEVCQCPPGYTGSSCESCWPRHRRVNGTIFGGICEPCQCFGHAESCDDVTGECLNCKDHTGGPYCDKCLPGFYGEPTKGTSEDCQPCACPLNIPSNNFSPTCHLDRSLGLICDGCPVGYTGPRCERCAEGYFGQPSVPGGSCQPCQCNDNLDFSIPGSCDSLSGSCLICKPGTTGRYCELCADGYFGDAVDAKNCQPCRCNAGGSFSEVCHSQTGQCECRANVQGQRCDKCKAGTFGLQSARGCVPCNCNSFGSKSFDCEESGQCWCQPGVTGKKCDRCAHGYFNFQEGGCTACECSHLGNNCDPKTGRCICPPNTIGEKCSKCAPNTWGHSITTGCKACNCSTVGSLDFQCNVNTGQCNCHPKFSGAKCTECSRGHWNYPRCNLCDCFLPGTDATTCDSETKKCSCSDQTGQCTCKVNVEGIHCDRCRPGKFGLDAKNPLGCSSCYCFGTTTQCSEAKGLIRTWVTLKAEQTILPLVDEALQHTTTKGIVFQHPEIVAHMDLMREDLHLEPFYWKLPEQFEGKKLMAYGGKLKYAIYFEAREETGFSTYNPQVIIRGGTPTHARIIVRHMAAPLIGQLTRHEIEMTEKEWKYYGDDPRVHRTVTREDFLDILYDIHYILIKATYGNFMRQSRISEISMEVAEQGRGTTMTPPADLIEKCDCPLGYSGLSCEACLPGFYRLRSQPGGRTPGPTLGTCVPCQCNGHSSLCDPETSICQNCQHHTAGDFCERCALGYYGIVKGLPNDCQQCACPLISSSNNFSPSCVAEGLDDYRCTACPRGYEGQYCERCAPGYTGSPGNPGGSCQECECDPYGSLPVPCDPVTGFCTCRPGATGRKCDGCKHWHAREGWECVFCGDECTGLLLGDLARLEQMVMSINLTGPLPAPYKMLYGLENMTQELKHLLSPQRAPERLIQLAEGNLNTLVTEMNELLTRATKVTADGEQTGQDAERTNTRAKSLGEFIKELARDAEAVNEKAIKLNETLGTRDEAFERNLEGLQKEIDQMIKELRRKNLETQKEIAEDELVAAEALLKKVKKLFGESRGENEEMEKDLREKLADYKNKVDDAWDLLREATDKIREANRLFAVNQKNMTALEKKKEAVESGKRQIENTLKEGNDILDEANRLADEINSIIDYVEDIQTKLPPMSEELNDKIDDLSQEIKDRKLAEKVSQAESHAAQLNDSSAVLDGILDEAKNISFNATAAFKAYSNIKDYIDEAEKVAKEAKDLAHEATKLATGPRGLLKEDAKGCLQKSFRILNEAKKLANDVKENEDHLNGLKTRIENADARNGDLLRTLNDTLGKLSAIPNDTAAKLQAVKDKARQANDTAKDVLAQITELHQNLDGLKKNYNKLADSVAKTNAVVKDPSKNKIIADADATVKNLEQEADRLIDKLKPIKELEDNLKKNISEIKELINQARKQANSIKVSVSSGGDCIRTYKPEIKKGSYNNIVVNVKTAVADNLLFYLGSAKFIDFLAIEMRKGKVSFLWDVGSGVGRVEYPDLTIDDSYWYRIVASRTGRNGTISVRALDGPKASIVPSTHHSTSPPGYTILDVDANAMLFVGGLTGKLKKADAVRVITFTGCMGETYFDNKPIGLWNFREKEGDCKGCTVSPQVEDSEGTIQFDGEGYALVSRPIRWYPNISTVMFKFRTFSSSALLMYLATRDLRDFMSVELTDGHIKVSYDLGSGMASVVSNQNHNDGKWKSFTLSRIQKQANISIVDIDTNQEENIATSSSGNNFGLDLKADDKIYFGGLPTLRNLSMKARPEVNLKKYSGCLKDIEISRTPYNILSSPDYVGVTKGCSLENVYTVSFPKPGFVELSPVPIDVGTEINLSFSTKNESGIILLGSGGTPAPPRRKRRQTGQAYYVILLNRGRLEVHLSTGARTMRKIVIRPEPNLFHDGREHSVHVERTRGIFTVQVDENRRYMQNLTVEQPIEVKKLFVGGAPPEFQPSPLRNIPPFEGCIWNLVINSVPMDFARPVSFKNADIGRCAHQKLREDEDGAAPAEIVIQPEPVPTPAFPTPTPVLTHGPCAAESEPALLIGSKQFGLSRNSHIAIAFDDTKVKNRLTIELEVRTEAESGLLFYMARINHADFATVQLRNGLPYFSYDLGSGDTHTMIPTKINDGQWHKIKIMRSKQEGILYVDGASNRTISPKKADILDVVGMLYVGGLPINYTTRRIGPVTYSIDGCVRNLHMAEAPADLEQPTSSFHVGTCFANAQRGTYFDGTGFAKAVGGFKVGLDLLVEFEFRTTTTTGVLLGISSQKMDGMGIEMIDEKLMFHVDNGAGRFTAVYDAGVPGHLCDGQWHKVTANKIKHRIELTVDGNQVEAQSPNPASTSADTNDPVFVGGFPDDLKQFGLTTSIPFRGCIRSLKLTKGTGKPLEVNFAKALELRGVQPVSCPAN

SEQ ID NO: 129 - protein, 3117 aa, Homo sapiens
MRSSKSKEVPLPNPRNSQSKDTVQADITTSWDALSQTKAALRHIENKLEVAPTSTAVCDSVMDTKKSSTSATRKISRKDGRYLDDSWVNAPISKSTKSRKEKSRSPLRATTLESNVKKNNRVEFREPLVSYREIHGAPSNFSSSHLESKHVYCVDVNEEKTESGNWMIGSREERNIRSCDFESSQSSVINDTVVRFLNDRPAIDALQNSECLIRMGASMRTEEEMPNRTKGSENNLKLSVNNMAHDTDPKALRLTDSSPSSTSTSNSQRLDILKRRQHDVKLEKLKERIRKQWEHSEETNGRGQKLGHIDHPVMVVNVDNSVTAKVRKVATAPPAPAYKGFNPSETKIRTPDGKVWQEAEFQNMSRELYRDLALHFADDISIKEKPAEKSKEKKVVKPVRKVQKVAQLSSTECRTGSSHLISTSSWRDGQKLVKKILGPAPRMEPKEQRTASSDRGGRERTAKSGGHIGRAESDPRLDVLHRHLQRNSERSRSKSRSENNIKKLASSLPDNKQEENTALNKDFLPIEIRGILDDLQLDSTAHTAKQDTVELQNQKSSAPVHAPRSHSPVKRKPDKITANEDPPVISKRRHYDTDEVRQYIVRQQEERKRKQNEEKKAQKEATEQKNKRLQELYRKQKEAFTKVKNVPPSEPSATRRLQETYSKLLLEKTLLEEPSHQHVTQETQAKPGYQPSGESDKENKVQERPPSASSSSDMSLSEPPQPLARKDLMESTWMQPERLSPQVHHSQPQPFAGTAGSLLSHLLSLEHVGILHKDFESILPTRKNHNMASRPLTFTPQPYVTSPAAYTDALLKPSASQYKSKLDRIEALKATAASLSSRIESEAKKLAGASINYGSAWNTEYDVQQAPQEDGPWTKAVTPPVKDDNEDVFSARIQKMLGSCVSHATFDDDLPGVGNLSEFKKLPEMIRPQSAISSFRVRSPGPKPEGLLAQLCKRQTDSSSSDMQACSQDKAKISLGSSIDSVSEGPLLSEGSLSEEEGDQDGQPLLKVAEILKEKEFCPGERNSYEPIKEFQKEAEKFLPLFGHIGGTQSKGPWEELAKGSPHSVINIFTKSYQLYGKGFEDKLDRGTSTSRPLNATATPLSGVSYEDDFVSSPGTGTSTEKKSTLEPHSTLSPQEDHSNRKSAYDPSSVDVTSQHSSGAQSAASSRSSTSSKGKKGKKEKTEWLDSFTGNVQNSLLDEEKAERGSHQGKKSGTSSKLSVKDFEQTLDTDSTLEDLSGHSVSVSSDKGRSQKTPTSPLSPSSQKSLQFDVAGTSSERSKSSVMPPTITGFKPNAPLTDLNPAASRTTTENMAPIPGSKRFSPAGLHHRMAAELSYLNAIEESVRQLSDVERVRGISLAQQESVSLAQIIKAQQQRHERDLALLKLKAEQEALESQRQLEETRNKAAQVHAESLQQVVQSQREVTEVLQEATCKIAAQQSETARLTTDAARQICEMAELTRTHISDAVVASGAPLAILYDHQRQHLPDFVKQLRTRTETDRKSPSVSLSQSKEGTLDSKHQKYSASYDSYSESSGYKNHDRRSSSGSSRQESPSVPSCKENEKKLNGEKIESSIDEQVQTAADDSLRSDSVPSLPDEKDSTSIATEYSLKFDESMTEDEIEEQSFRSLLPSESHRRFNMEKRRGHHDDSDEEASPEKTTLSTAKELNMPFSGGQDSFSKFTMEMVRQYMKEEEMRAAHQSSLLRLREKALKEKTKAELAWLEHQKKHLRDKGEDDKMPPLRKKQRGLLLRLQQEKAEIKRLQEANKAARKERQLILKQQEEIEKIRQTTIKLQEKLKSAGESKLDSHSDDDTKDNKATSPGPTDLETRSPSPISISSSETSSIMQKLKKMRSRMDEKFLTKREQKLMQRRQHAEELLEWKRRLDAEEAEIRQMEKQALAAWDKELIKPKTPKKELEDQRTEQKEIASEEESPVPLYSHLNSESSIPEELGSPAVEYVPSESIGQEQPGSPDHSILTEEMICSQELESSTSPSKHSLPKSCTSVSKQESSKGSHRTGGQCHLPIKSHQHCYSWSDESLSMTQSETTSDQSDIEGRIRALKDELRKRKSVVNQLKKEQKKRQKERLKAQEASLIKQLESYDEFIKKTEAELSQDLETSPTAKPQIKTLSSASEKPKIKPLTPLHRSETAKNWKSLTESERSRGSLESIAEHVDASLSGSERSVSERSLSAYAKRVNEWDSRTEDFQTPSPVLRSSRKIREESGDSLENVPALHLLKELNATSRILDMSDGKVGESSKKSEIKEIEYTKLKKSKIEDAFSKEGKSDVLLKLVLEQGDSSEILSKKDLPLDSENVQKDLVGLAIENLHKSEEMLKERQSDQDMNHSPNIQSGKDIHEQKNTKEKDLSWSEHLFAPKEIPYSEDFEVSSFKKEISAELYKDDFEVSSLLSLRKDSQSCRDKPQPMRSSTSGATSFGSNEEISECLSEKSLSIHSNVHSDRLLELKSPTELMKSKERSDVEHEQQVTESPSLASVPTADELFDFHIGDRVLIGNVQPGILRFKGETSFAKGFWAGVELDKPEGNNNGTYDGIAYFECKEKHGIFAPPQKISHIPENFDDYVDINEDEDCYSDERYQCYNQEQNDTEGPKDREKDVSEYFYEKSLPSVNDIEASVNRSRSLKIETDNVQDISGVLEAHVHQQSSVDSQISSKENKDLISDATEKVSIAAEDDTLDNTFSEELEKQQQFTEEEDNLYAEASEKLCTPLLDLLTREKNQLEAQLKSSLNEEKKSKQQLEKISLLTDSLLKVFVKDTVNQLQQIKKTRDEKIQLSNQELLGDDQKKVTPQDLSQNVEEQSPSISGCFLSSELEDEKEEISSPDMCPRPESPVFGASGQEELAKRLAELELSREFLSALGDDQDWFDEDFGLSSSHKIQKNKAEETIVPLMAEPKRVTQQPCETLLAVPHTAEEVEILVHNAAEELWKWKELGHDLHSISIPTKLLGCASKGLDIESTSKRVYKQAVFDLTKEIFEEIFAEDPNLNQPVWMKPCRINSSYFRRVKNPNNLDEIKSFIASEVLKLFSLKKEPNHKTDWQKMMKFGRKKRDRVDHILVQELHEEEAQWVNYDEDELCVKMQLADGIFETLIKDTIDVLNQISEKQGRMLLV

SEQ ID NO: 130 - protein, 832 aa, Homo sapiens
MILQAHLHSLCLLMLYLATGYGQEGKFSGPLKPMTFSIYEGQEPSQIIFQFKANPPAVTFELTGETDNIFVIEREGLLYYNRALDRETRSTHNLQVAALDANGIIVEGPVPITIKVKDINDNRPTFLQSKYEGSVRQNSRPGKPFLYVNATDLDDPATPNGQLYYQIVIQLPMINNVMYFQINNKTGAISLTREGSQELNPAKNPSYNLVISVKDMGGQSENSFSDTTSVDIIVTENIWKAPKPVEMVENSTDPHPIKITQVRWNDPGAQYSLVDKEKLPRFPFSIDQEGDIYVTQPLDREEKDAYVFYAVAKDEYGKPLSYPLEIHVKVKDINDNPPTCPSPVTVFEVQENERLGNSIGTLTAHDRDEENTANSFLNYRIVEQTPKLPMDGLFLIQTYAGMLQLAKQSLKKQDTPQYNLTIEVSDKDFKTLCFVQINVIDINDQIPIFEKSDYGNLTLAEDTNIGSTILTIQATDADEPFTGSSKILYHIIKGDSEGRLGVDTDPHTNTGYVIIKKPLDFETAAVSNIVFKAENPEPLVFGVKYNASSFAKFTLIVTDVNEAPQFSQHVFQAKVSEDVAIGTKVGNVTAKDPEGLDISYSLRGDTRGWLKIDHVTGEIFSVAPLDREAGSPYRVQVVATEVGGSSLSSVSEFHLILMDVNDNPPRLAKDYTGLFFCHPLSAPGSLIFEATDDDQHLFRGPHFTFSLGSGSLQNDWEVSKINGTHARLSTRHTEFEEREYVVLIRINDGGRPPLEGIVSLPVTFCSCVEGSCFRPAGHQTGIPTVGMAVGILLTTLLVIGIILAVVFIRIKKDKGKDNVESAQASEVKPLRS

SEQ ID NO: 131 - protein, 5005 aa, Homo sapiens
MDQRKNESIVPSITQLEDFLTEHNSNVVWLLVATILSCGWIIYLTYYNSRNVGLILTLVLNRLYKHGYIHIGSFSFSVLSGKVMVREIYYITEDMSIRIQDGFIIFRWWKMYNPKQKQHDPKAETRLYITVNDFEFHVYNRSDLYGRLQELFGLEPTIIPPKKDDDKTREIGRTRTQSKIERVKVKTESQDPTSSWRSLIPVIKVNVSTGRLAFGNHYQPQTLCINFDDAFLTYTTKPPSSHLDQFMHIVKGKLENVRVMLVPSPRYVGLQNDEPPRLMGEGFVVMQSNDVDIYYYMDEPGLVPEETEENIEGEMSSEDCKLQDLPPCWGLDIVCGKGTDFNYGPWADRQRDCLWKFFFPPDYQVLKVSEIAQPGRPRQILAFELRMNIIADATIDLLFTKNRETNAVHVNVGAGSYLEINIPMTVEENGYTPAIKGQLLHVDATTSMQYRTLLEAEMLAFHINASYPRIWNMPQTWQCELEVYKATYHFIFAQKNFFTDLIQDWSSDSPPDIFSFVPYTWNFKIMFHQFEMIWAANQHNWIDCSTKQQENVYLAACGETLNIDFSLPFTDFVPATCNTKFSLRGEDVDLHLFLPDCHPSKYSLFMLVKNCHPNKMIHDTGIPAECQSGQKTVKPKWRNVTQEKSGWVECWTVPSVMLTIDYTWHPIYPQKADEQLKQSLSEMEETMLSVLRPSQKTSDRVVSSPSTSSRPPIDPSELPPDKLHVEMELSPDSQITLYGPLLNAFLCIKENYFGEDDMYMDFEEVISSPVLSLSTSSSSGWTAVGMENDKKENEGSAKSIHPLALRPWDITVLVNLYKVHGRLPVHGTTDGPECPTAFLERLCFEMKKGFRETMLQLILSPLNVFVSDNYQQRPPVDEVLREGHINLSGLQLRAHAMFSAEGLPLGSDSLEYAWLIDVQAGSLTAKVTAPQLACLLEWGQTFVFHVVCREYELERPKSVIICQHGIDRRFCESKLSCIPGPCPTSDDLKYTMIRLAVDGADIYIVEHGCATNIKMGAIRVANCNLHNQSVGEGISAAIQDFQVRQYIEQLNNCRIGLQPAVLRRAYWLEAGSANLGLITVDIALAADHHSKHEAQRHFLETHDARTKRLWFLWPDDILKNKRCRNKCGCLGGCRFFGGTVTGLDFFKLEELTPSSSSAFSSTSAESDMYYGQSLLQPGEWIITKEIPKIIDGNVNGMKRKEWENKSVGIEVERKTQHLSLQVPLRSHSSSSSSEENSSSSAAQPLLAGEKESPSSVADDHLVQKEFLHGTKRDDGQASIPTEISGNSPVSPNTQDKSVGQSPLRSPLKRQASVCSTRLGSTKSLTAAFYGDKQPVTVGVQFSSDVSRSDENVLDSPKQRRSFGSFPYTPSADSNSFHQYRSMDSSMSMADSEAYFSAAEEFEPISSDEGPGTYPGRKKKKKQTQQIDYSRGSIYHSVEGPLTGHGESIQDSRTLPFKTHPSQASFVSALGGEDDVIEHLYIVEGEKTVESEQITPQQPVMNCYQTYLTQFQVINWSVKHPTNKRTSKSSLHRPLDLDTPTSEESSSSFEQLSVPTFKVIKQGLTANSLLDRGMQLSGSTSNTPYTPLEKKLADNTDDETLTEEWTLDQPVSQTRTTAIVEVKGTVDIVLTPLVAEALDRYIEAMVHCASTRHPAAIVDDLHAKVLREAVQNSKTTFSENLSSKQDIRGTKTEQSTIGTTNQGQAQTNLTMKQDNVTIKGLQTNVSIPKVNLCLLQASVEESPTTAPSRSVTHVSLVALCFDRIATQVRMNRGVVEETSNNAEPGRTSNFDRYVHATKMQPQSSGSLRSNAGAEKGKEIAAKLNIHRVHGQLRGLDTTDIGTCAITAIPFEKSKVLFTLEELDEFTFVDETDQQAVPDVTRIGPSQEKWGWIMFECGLENLTIKGGRQSGAVLYNSFGIMGKASDTERGGVLTSNNSSDSPTGSGYNTDVSDDNLPCDRTSPSSDLNGNSVSDEQDEGVESDDLKKDLPLMPPPPDSCSMKLTIKEIWFSFAAPTNVRSHTHAFSRQLNLLSTATPAVGAWLVPIDQLKSSLNKLETEGTLRICAVMGCIMTEALENKSVHFPLRSKYNRLTKVARFLQENPSCLLCNILHHYLHQANYSIIDDATMSDGLPALVTLKKGLVALARQWMKFIVVTPAFKGVSLHRPAQPLKPQIAMDHEHEDGLGLDNGGGLQSDTSADGAEFEFDAATVSEHTMLLEGTANRPPPGSSGPVTGAEIMRKLSKTHTHSDSALKIKGIHPYHSLSYTSGDTATDSPVHVGRAGMPVKDSPRKESLLSYLTGSFPSLHNLLEGTPQRSSAAVKSSSLTRTGNTVATDMLSEHPLLSEPSSVSFYNWMSNAVGNRGSVLQESPVTKSGHNSLPTGVAPNLPTIPSASDFNTVLSSDQNTLDGTHSQHSTSQDDVAGVEEANQGFPAVQLADAQVVFKPLLSHTGIQSQDTMPFCYRMYFGEHLSFSGTLDCLRADIVDSDTAKERKGKRARRQGHVNLPPLEFKPALMLGTFSISAVVMEKSVCTPQNSTSALSFHDLSKRYYNTFHCNFTISCQSISQHVDMALVRLIHQFSTMIDDIKATQTDIKLSRYTAGSASPTPTFKTRKHRDFRSSDFSRSSRGSLNGGNRVNNAKNKRTNNENNKKESRNKNSLGRSERRTSKVSRKGSKDVVDHMTIHMDDSDSITVSEQSEPSAECWQNMYKLLNFYSLISDPTGILEKSSETFGPAGVRSPTEPTCKVVFENEQDNSSLTKTQRKRSLVTSEPQHVTLIVFGIGMVNRTHLEADIGGLTMESELKRIHGSFTLKEKMKDVLHQKMTETCATAHIGGVNIVLLEGITPNIQLEDFPTSPTSTAKQEFLTVVKCSIAKSQALYSAQRGLKTNNAAVFKVGAISINIPQHPATLHSMMVRSSHQLSKQISDLIRQPSTAPQPVKEDIATPLPSEKTPTSVNQTPVETNEFPQLPEGLEKKPIVLKFSAMLDGIAIGAALLPSLKAEYKMGRMRSHGMTGAQTRFTFELPNHRLRFTSKVSATDMSTIPPSASLNLPPVTMSGKYIMEEHDSYSDQVWSIDELPSKQGYYLQGNYLRCVAEVGSFEHNLTTDLLNHLVFVQKVFMKEVNEVIQKVSGGEQPIPLWNEHDGTADGDKPKILLYSLNLQFKGIQVTATTPSMRAVRFETGLIELELSNRLQTKASPGSSSYLKLFGKCQVDLNLALGQIVKHQVYEEAGSDFHQVAYFKTRIGLRNALREEISGSSDREAVLITLNRPIVYAQPVAFDRAVLFWLNYKAAYDNWNEQRMALHKDIHMATKEVVDMLPGIQQTSAQAFGTLFLQLTVNDLGICLPITNTAQSNHTGDLDTGSALVLTIESTLITACSSESLVSKGHFKNFCIRFADGFETSWDDWKPEIHGDLVMNACVVPDGTYEVCSRTTGQAAAESSSAGTWTLNVLWKMCGIDVHMDPNIGKRLNALGNTLTTLTGEEDIDDIADLNSVNIADLSDEDEVDTMSPTIHTEATDYRRQAASASQPGELRGRKIMKRIVDIRELNEQAKVIDDLKKLGASEGTINQEIQRYQQLESVAVNDIRRDVRKKLRRSSMRAASLKDKWGLSYKPSYSRSKSISASGRPPLKRMERASSRVGETEELPEIRVDAASPGPRVTFNIQDTFPEETELDLLSVTIEGPSHYSSNSEGSCSVFSSPKTPGGFSPGIPFQTEEGRRDDSLSSTSEDSEKDEKDEDHERERFYIYRKPSHTSRKKATGFAAVHQLFTERWPTTPVNRSLSGTATERNIDFELDIRVEIDSGKCVLHPTTLLQEHDDISLRRSYDRSSRSLDQDSPSKKKKFQTNYASTTHLMTGKKVPSSLQTKPSDLETTVFYIPGVDVKLHYNSKTLKTESPNASRGSSLPRTLSKESKLYGMKDSATSPPSPPLPSTVQSKTNTLLPPQPPPIPAAKGKGSGGVKTAKLYAWVALQSLPEEMVISPCLLDFLEKALETIPITPVERNYTAVSSQDEDMGHFEIPDPMEESTTSLVSSSTSAYSSFPVDVVVYVRVQPSQIKFSCLPVSRVECMLKLPSLDLVFSSNRGELETLGTTYPAETLSPGGNATQSGTKTSASKTGIPGSSGLGSPLGRSRHSSSQSDLTSSSSSSSGLSFTACMSDFSLYVFHPYGAGKQKTAVSGLTPGSGGLGNVDEEPTSVTGRKDSLSINLEFVKVSLSRIRRSGGASFFESQSVSKSASKMDTTLINISAVCDIGSASFKYDMRRLSEILAFPRAWYRRSIARRLFLGDQTINLPTSGPGTPDSIEGVSQHLSPESSRKAYCKTWEQPSQSASFTHMPQSPNVFNEHMTNSTMSPGTVGQSLKSPASIRSRSVSDSSVPRRDSLSKTSTPFNKSNKAASQQGTPWETLVVFAINLKQLNVQMNMSNVMGNTTWTTSGLKSQGRLSVGSNRDREISMSVGLGRSQLDSKGGVVGGTIDVNALEMVAHISEHPNQQPSHKIQITMGSTEARVDYMGSSILMGIFSNADLKLQDEWKVNLYNTLDSSITDKSEIFVHGDLKWDIFQVMISRSTTPDLIKIGMKLQEFFTQQFDTSKRALSTWGPVPYLPPKTMTSNLEKSSQEQLLDAAHHRHWPGVLKVVSGCHISLFQIPLPEDGMQFGGSMSLHGNHMTLACFHGPNFRSKSWALFHLEEPNIAFWTEAQKIWEDGSSDHSTYIVQTLDFHLGHNTMVTKPCGALESPMATITKITRRRHENPPHGVASVKEWFNYVTATRNEELNLLRNVDANNTENSTTVKNSSLLSGFRGGSSYNHETETIFALPRMQLDFKSIHVQEPQEPSLQDASLKPKVECSVVTEFTDHICVTMDAELIMFLHDLVSAYLKEKEKAIFPPRILSTRPGQKSPIIIHDDNSSDKDREDSITYTTVDWRDFMCNTWHLEPTLRLISWTGRKIDPVGVDYILQKLGFHHARTTIPKWLQRGVMDPLDKVLSVLIKKLGTALQDEKEKKGKDKEEH

SEQ ID NO: 132 - protein, 4707 aa, Homo sapiens
MEKDAEDGAPSEGAEAPPSTEEAAPPRSEEEEAPRPPTVEAPAEDGFSPSAEDAVSSVVDYRDLIPSEEGIVLPDDHEADLNRVRQRLAPRPVQSVISEVLSLPSSRRSSRYRRSMSGLPNLQETLKERQARFREARESRRLKIDPSYKYIFEILAENLGLDIVTVEELILDCPSLEAFTNFFAKDGCKTLKFLYQEGDVPGIECGRTIAGATKGAKMMKLYIDNAAPDKLKGLCIFFVRCRNDVAINVKTIQEEALFTVLDASKGLLNGIRDMLANIFLPAVLATNNWGALNQSKQGESEKHIFTETINRYLSFLDGARISIEGTVKLKTIDNVNFSKLHTFEEVTAAASNSETVHQLEEVLMVWYKQIEQVLIESEQMRKEAGDSGPLTELEHWKRMSAKFNYIIEQIKGPSCKAVINVLNVAHSKLLKNWRDLDARITDTANESKDNVRYLYTLEKVCQPLYNHDLVSMAHGIQNLINAIRMIHGVSRYYNTSERMTSLFIKVTNQMVTACKAYITDGGLNHVWDQETPVVLKKIQDCIFLFKEYQASFHKTRKLISESSGEKSFEVSEMYIFGKFEAFCKRLEKITEMITVVQTYSTLSNSTIEGIDIMAIKFRNIYQGVKKKQYDILDPRRTEFDTDFLDFMTKINGLEVQIQAFMNSSFGKILSSQQALQLLQRFQKLNIPCLGLEINHTIERILQYYVAELDATKKLYHSQKDDPPLARNMPPIAGKILWVRQLYRRISEPINYFFKNSDILSSPDGKAVIRQYNKISYVLVEFEVVYHTAWIREISQLHYALQATLFVRHPETGKLLVNFDPKILEVVRETKCMIKMKLDVPEQAKRLLKLESKLKADKLYLQGLLQYYDELCQEVPSVFVNLMTPKMKKVESVLRQGLTVLTWSSLTLESFFQEVELVLDMFNQLLKKISDLCEMHIDTVLKEIAKTVLISLPESGATKVEDMLTLNETYTKEWADILNHKSKHVEEAVRELISIFEQIYEVKYTGKVGKQSEQRKHVVFGSETGEGENNDYEANIVNEFDTHDKEDEFKKECKEVFAFFSHQLLDSLQKATRLSLDTMKRRIFVASLYGRKQSEDIISFIKSEVHLAIPNVVMIPSLDDIQQAINRMIQLTLEVSRGVAHWGQQQIRPIKSVIPSPTTTDVTHQNTGKLLKKEERSFEEAIPARKLKNFYPGVAEHKDISKLVLLLSSSVNSLRKAAHEALQDFQKYKTLWTEDRDVKVKEFLANNPSLTEIRSEILHYATFEQEIDELKPIIVVGALELHTEPMKLALSIEAKAWKMLLCRYLNEEYKKKMSYMIAFINEYLKKLSRPIRDLDDVRFAMEALSCIRDNEIQMDMTLGPIEEAYAILNRFEVEVTKEESEAVDTLRYSFNKLQSKAVSVQEDLVQVQPKFKSNLLESVEVFREDVINFAEAYELEGPMVPNIPPQEASNRLQIFQASFDDLWRKFVTYSSGEQLFGLPVTDYEVLHKTRKELNLLQKLYGLYDTVMSSISGYYEILWGDVDIEKINAELLEFQNRCRKLPKGLKDWQAFLDLKKRIDDFSESCPLLEMMTNKAMKQRHWDRISELTGTPFDVESDSFCLRNIMEAPLLKHKDDIEDICISAIKEKDIEAKLTQVIENWTNQNLSFAAFKGKGELLLKGTESGEIITLMEDSLMVLGSLLSNRYNAPFKKNIQNWVYKLSTSSDIIEEWLVVQNLWVYLEAVFVGGDIAKQLPQEAKRFQNIDKSWIKIMQRAHENPNVINCCVGDETMGQLLPHLHEQLEVCQKSLTGYLEKKRLLFPRFFFVSDPVLLEILGQASDSHTIQPHLPAVSDNINEVTFHAKDYDRIMAVISREGEKIVLDNSVMAKGPVEIWLLDLLKMQMSSLHNIIRSAFYQISDSGFQLLPFLSHFPAQVGLLGIQMLWTHDSEEALRNAKDDRKIMQVTNQKFLDILNTLISQTTHDLSKFDRVKFETLITIHVHQRDIFDDLVKMHIKSPTDFEWLKQSRFYFKEDLDQTVVSITDVDFIYQNEFLGCTDRLVITPLTDRCYITLAQALGMNMGGAPAGPAGTGKTETTKDMGRCLGKYVVVFNCSDQMDFRGLGRIFKGLAQSGSWGCFDEFNRIELPVLSVAAQQIYIVLTARKERKKQFIFSDGDCVDLNPEFGIFLTMNPGYAGRQELPENLKIQFRTVAMMVPDRQIIMRVKLASCGFLENVILAQKFYVLYKLCEEQLTKQVHYDFGLRNILSVLRTLGSQKRARPEDSELSIVMRGLRDMNLSKLVDEDEPLFLSLINDLFPGLQLDSNTYAELQNAVAHQVQIEGLINHPPWNLKLVQLYETSLVRHGLMTLGPSGSGKTTVITILMKAQTECGRPHREMRMNPKAITAPQMFGRLDTATNDWTDGIFSTLWRKTLKAKKGENIFLILDGPVDAIWIENLNSVLDDNKTLTLANGDRIPMAPSCKLLFEVHNIENASPATVSRMGMVYISSSALSWRPILQAWLKKRTAQEAAVFLTLYEKVFEDTYTYMKLNLNPKMQLLECNYIVQSLNLLEGLIPSKEEGGVSCVEHLHKLFVFGLMWSLGALLELESREKLEAFLRQHESKLDLPEIPKGSNQTMYEFYVTDYGDWEHWNKKLQPYYYPTDSIPEYSSILVPNVDNIRTNFLIDTIAKQHKAVLLTGEQGTAKTVMVKAYLKKYDPEVQLSKSLNFSSATEPMMFQRTIESYVDKRIGSTYGPPGGRKMTVFIDDINMPVINEWGDQITNEIVRQMMEMEGMYSLDKPGDFTTIVDVQLIAAMIHPGGGRNDIPQRLKRQFTVFNCTLPSNASIDKIFGIIGCGYFDPCRSFKPQICEMIVNLVSVGRVLWQWTKVKMLPTPSKFHYIFNLRDLSRIWQGMLTIKAEECASIPTLLSLFKHECSRVIADRFITPEDEQWFNAHLTRAVEENIGSDAASCILPEPYFVDFLREMPEPTGDEPEDSVFEVPKIYELMPSFDFLAEKLQFYQRQFNEIIRGTSLDLVFFKDAMTHLIKISRIIRTSCGNALLVGVGGSGKQSLSRLASFIAGYQIFQITLTRSYNVTNLTDDLKALYKVAGADGKGITFIFTDSEIKDEAFLEYLNNLLSSGEISNLFARDEMDEITQGLISVMKRELPRHPPTFDNLYEYFISRSRKNLHVVLCFSPVGEKFRARSLKFPGLISGCTMDWFSRWPREALIAVASYFLSDYNIVCSSEIKRQVVETMGLFHDMVSESCESYFQRYRRRAHVTPKSYLSFINGYKNIYAEKVKFINEQAERMNIGLDKLMEASESVAKLSQDLAVKEKELAVASIKADEVLAEVTVSAQASAKIKNEVQEVKDKAQKIVDEIDSEKVKAESKLEAAKPALEEAEAALNTIKPNDIATVRKLAKPPHLIMRIMDCVLLLFQKKIDPVTMDPEKSCCKPSWGESLKLMSATGFLWSLQQFPKDTINEETVELLQPYFNMDDYTFESAKKVCGNVAGLLSWTLAMAIFYGINREVLPLKANLAKQEGRLAVANAELGKAQALLDEKQAELDKVQAKFDAAMNEKMDLLNDADTCRKKMQAASTLIDGLSGEKIRWTQQSKEFKAQINRLVGDILLCTGFLSYLGPFNQIFRNYLLKDQWEMELRARKIPFTENLNLISMLVDPPTIGEWGLQGLPGDDLSIQNGIIVTKATRYPLLIDPQTQGKTWIKSKEKENDLQVTSLNHKYFRTHLEDSLSLGRPLLIEDIHEELDPALDNVLEKNFIKSGTTFKVKVGDKECDIMDTFKLYITTKLPNPAFTPEINAKTSVIDFTVTMKGLENQLLRRVILTEKQELEAERVKLLEDVTFNKRKMKELEDNLLYKLSATKGSLVDDESLIGVLRTTKQTAAEVSEKLHVAAETEIKINAAQEEFRPAATRGSILYFLITEMSMVNIMYQTSLAQFLKLFDQSMARSEKSPLPQKRITNIIEYLTYEVFTYSVRGLYENHKFLFVLLMTLKIDLQRGTVKHREFQALIKGGAALDLKACPPKPYRWILDMTWLNLVELSKLPQFAEIMNQISRNEKGWKSWFDKDAPEEEIIPDGYNDSLDTCHKLLLIRSWCPDRTVFQARKYIADSLEEKYTEPVILNLEKTWEESDTRTPLICFLSMGSDPTNQIDALAKKLKLECRTISMGQGQEVHARKLIQMSMQQGGWVLLQNCHLGLEFMEELLETLITTEASDDSFRVWITTEPHDRFPITLLQTSLKFTNEPPQGVRAGLKRTFAGINQDLLDISNLPMWKPMLYTVAFLHSTVQERRKFGPLGWNIPYEFNSADFSASVQFIQNHLDECDIKKGVSWNTVRYMIGEVQYGGRVTDDFDKRLLNCFARVWFSEKMFEPSFCFYTGYKIPLCKTLDQYFEYIQSLPSLDNPEVFGLHPNADITYQSNTASAVLETITNIQPKESGGGVGETREAIVYRLSEDMLSKLPPDYIPHEVKSRLIKMGHLNSMNIFLRQEIDRMQRVISILRSSLSDLKLAIEGTIIMSENLRDALDNMYDARIPQLWKRVSWDSSTLGFWFTELLERNAQFSTWIFEGRPNVFWMTGFFNPQGFLTAMRQEVTRAHKGWALDTVTIHNEVLRQTKEEITSPPGEGVYIYGLYMDGAAWDRRNGKLMESTPKVLFTQLPVLHIFAINSTAPKDPKLYVCPIYKKPRRTDLTFITVVYLRTVLSPDHWILRGVALLCDIK

SEQ ID NO: 133 - protein, 4069 aa, Homo sapiens
MASRDSNHAGESFLGSDGDEEATRELETEEESEGEEDETAAESEEEPDSRLSDQDEEGKIKQEYIISDPSFSMVTVQREDSGITWETNSSRSSTPWASEESQTSGVCSREGSTVNSPPGNVSFIVDEVKKVRKRTHKSKHGSPSLRRKGNRKRNSFESQDVPTNKKGSPLTSASQVLTTEKEKSYTGIYDKARKKKTTSNTPPITGAIYKEHKPLVLRPVYIGTVQYKIKMFNSVKEELIPLQFYGTLPKGYVIKEIHYRKGKDASISLEPDLDNSGSNTVSKTRKLVAQSIEDKVKEVFPPWRGALSKGSESLTLMFSHEDQKKIYADSPLNATSALEHTVPSYSSSGRAEQGIQLRHSQSVPQQPEDEAKPHEVEPPSVTPDTPATMFLRTTKEECELASPGTAASENDSSVSPSFANEVKKEDVYSAHHSISLEAASPGLAASTQDGLDPDQEQPDLTSIERAEPVSAKLTPTHPSVKGEKEENMLEPSISLSEPLMLEEPEKEEIETSLPIAITPEPEDSNLVEEEIVELDYPESPLVSEKPFPPHMSPEVEHKEEELILPLLAASSPEHVALSEEEREEIASVSTGSAFVSEYSVPQDLNHELQEQEGEPVPPSNVEAIAEHAVLSEEENEEFEAYSPAAAPTSESSLSPSTTEKTSENQSPLFSTVTPEYMVLSGDEASESGCYTPDSTSASEYSVPSLATKESLKKTIDRKSPLILKGVSEYMIPSEEKEDTGSFTPAVAPASEPSLSPSTTEKTSECQSPLPSTATSEHVVPSEGEDLGSERFTPDSKLISKYAAPLNATQESQKKIINEASQFKPKGISEHTVLSVDGKEVIGPSSPDLVVASEHSFPPHTTEMTSECQAPPLSATPSEYVVLSDEEAVELERYTPSSTSASEFSVPPYATPEAQEEEIVHRSLNLKGASSPMNLSEEDQEDIGPFSPDSAFVSEFSFPPYATQEAEKREFECDSPICLTSPSEHTILSDEDTEEAELFSPDSASQVSIPPFRISETEKNELEPDSLLTAVSASGYSCFSEADEEDIGSTAATPVSEQFSSSQKQKAETFPLMSPLEDLSLPPSTDKSEKAEIKPEIPTTSTSVSEYLILAQKQKTQAYLEPESEDLIPSHLTSEVEKGEREASSSVAAIPAALPAQSSIVKEETKPASPHSVLPDSVPAIKKEQEPTAALTLKAADEQMALSKVRKEEIVPDSQEATAHVSQDQKMEPQPPNVPESEMKYSVLPDMVDEPKKGVKPKLVLNVTSELEQRKLSKNEPEVIKPYSPLKETSLSGPEALSAVKMEMKHDSKITTTPIVLHSASSGVEKQVEHGPPALAFSALSEEIKKEIEPSSSTTTASVTKLDSNLTRAVKEEIPTDSSLITPVDRPVLTKVGKGELGSGLPPLVTSADEHSVLAEEDKVAIKGASPIETSSKHLAWSEAEKEIKFDSLPSVSSIAEHSVLSEVEAKEVKAGLPVIKTSSSQHSDKSEEARVEDKQDLLFSTVCDSERLVSSQKKSLMSTSEVLEPEHELPLSLWGEIKKKETELPSSQNVSPASKHIIPKGKDEETASSSPELENLASGLAPTLLLLSDDKNKPAVEVSSTAQGDFPSEKQDVALAELSLEPEKKDKPHQPLELPNAGSEFSSDLGRQSGSIGTKQAKSPITETEDSVLEKGPAELRSREGKEENRELCASSTMPAISELSSLLREESQNEEIKPFSPKIISLESKEPPASVAEGGNPEEFQPFTFSLKGLSEEVSHPADFKKGGNQEIGPLPPTGNLKAQVMGDILDKLSEETGHPNSSQVLQSITEPSKIAPSDLLVEQKKTEKALHSDQTVKLPDVSTSSEDKQDLGIKQFSLMRENLPLEQSKSFMTTKPADVKETKMEEFFISPKDENWMLGKPENVASQHEQRIAGSVQLDSSSSNELRPGQLKAAVSSKDHTCEVRKQVLPHSAEESHLSSQEAVSALDTSSGNTETLSSKSYSSEEVKLAEEPKSLVLAGNVERNIAEGKEIHSLMESESLLLEKANTELSWPSKEDSQEKIKLPPERFFQKPVSGLSVEQVKSETISSSVKTAHFPAEGVEPALGNEKEAHRSTPPFPEEKPLEESKMVQSKVIDDADEGKKPSPEVKIPTQRKPISSIHAREPQSPESPEVTQNPPTQPKVAKPDLPEEKGKKGISSFKSWMSSLFFGSSTPDNKVAEQEDLETQPSPSVEKAVTVIDPEGTIPTNFNVAEKPADHSLSEVKLKTADEPRGTLVKSGDGQNVKEKSMILSNVEDLQQPKFISEVSREDYGKKEISGDSEEMNINSVVTSADGENLEIQSYSLIGEKLVMEEAKTIVPPHVTDSKRVQKPAIAPPSKWNISIFKEEPRSDQKQKSLLSFDVVDKVPQQPKSASSNFASKNITKESEKPESIILPVEESKGSLIDFSEDRLKKEMQNPTSLKISEEETKLRSVSPTEKKDNLENRSYTLAEKKVLAEKQNSVAPLELRDSNEIGKTQITLGSRSTELKESKADAMPQHFYQNEDYNERPKIIVGSEKEKGEEKENQVYVLSEGKKQQEHQPYSVNVAESMSRESDISLGHSLGETQSFSLVKATSVTEKSEAMLAEAHPEIREAKAVGTQPHPLEESKVLVEKTKTFLPVALSCRDEIENHSLSQEGNLVLEKSSRDMPDHSEEKEQFRESELSKGGSVDITKETVKQGFQEKAVGTQPRPLEESKVLVEKTKTFLPVVLSCHDEIENHSLSQEGNLVLEKSSRDMPDHSEEKEQFKESELWKGGSVDITKESMKEGFPSKESERTLARPFDETKSSETPPYLLSPVKPQTLASGASPEINAVKKKEMPRSELTPERHTVHTIQTSKDDTSDVPKQSVLVSKHHLEAAEDTRVKEPLSSAKSNYAQFISNTSASNADKMVSNKEMPKEPEDTYAKGEDFTVTSKPAGLSEDQKTAFSIISEGCEILNIHAPAFISSIDQEESEQMQDKLEYLEEKASFKTIPLPDDSETVACHKTLKSRLEDEKVTPLKENKQKETHKTKEEISTDSETDLSFIQPTIPSEEDYFEKYTLIDYNISPDPEKQKAPQKLNVEEKLSKEVTEETISFPVSSVESALEHEYDLVKLDESFYGPEKGHNILSHPETQSQNSADRNVSKDTKRDVDSKSPGMPLFEAEEGVLSRTQIFPTTIKVIDPEFLEEPPALAFLYKDLYEEAVGEKKKEEETASEGDSVNSEASFPSRNSDTDDGTGIYFEKYILKDDILHDTSLTQKDQGQGLEEKRVGKDDSYQPIAAEGEIWGKFGTICREKSLEEQKGVYGEGESVDHVETVGNVAMQKKAPITEDVRVATQKISYAVPFEDTHHVLERADEAGSHGNEVGNASPEVNLNVPVQVSFPEEEFASGATHVQETSLEEPKILVPPEPSEERLRNSPVQDEYEFTESLHNEVVPQDILSEELSSESTPEDVLSQGKESFEHISENEFASEAEQSTPAEQKELGSERKEEDQLSSEVVTEKAQKELKKSQIDTYCYTCKCPISATDKVFGTHKDHEVSTLDTAISAVKVQLAEFLENLQEKSLRIEAFVSEIESFFNTIEENCSKNEKRLEEQNEEMMKKVLAQYDEKAQSFEEVKKKKMEFLHEQMVHFLQSMDTAKDTLETIVREAEELDEAVFLTSFEEINERLLSAMESTASLEKMPAAFSLFEHYDDSSARSDQMLKQVAVPQPPRLEPQEPNSATSTTIAVYWSMNKEDVIDSFQVYCMEEPQDDQEVNELVEEYRLTVKESYCIFEDLEPDRCYQVWVMAVNFTGCSLPSERAIFRTAPSTPVIRAEDCTVCWNTATIRWRPTTPEATETYTLEYCRQHSPEGEGLRSFSGIKGLQLKVNLQPNDNYFFYVRAINAFGTSEQSEAALISTRGTRFLLLRETAHPALHISSSGTVISFGERRRLTEIPSVLGEELPSCGQHYWETTVTDCPAYRLGICSSSAVQAGALGQGETSWYMHCSEPQRYTFFYSGIVSDVHVTERPARVGILLDYNNQRLIFINAESEQLLFIIRHRFNEGVHPAFALEKPGKCTLHLGIEPPDSVRHK

SEQ ID NO: 134 - protein, 4486 aa, Homo sapiens
MRLAEERAALAAENADGEPGADRRLRLLGTYVAMSLRPAAGAWERCAGSAEAEQLLQAFLGRDAAEGPRPLLVVRPGPRGLAIRPGLEVGPESGLAGAKALFFLRTGPEPPGPDSFRGAVVCGDLPAAPLEHLAALFSEVVLPVLANEKNRLNWPHMICEDVRRHAHSLQCDLSVILEQVKGKTLLPLPAGSEKMEFADSKSETVLDSIDKSVIYAIESAVIKWSYQVQVVLKRESSQPLLQGENPTPKVELEFWKSRYEDLKYIYNQLRTITVRGMAKLLDKLQSSYFPAFKAMYRDVVAALAEAQDIHVHLIPLQRHLEALENAEFPEVKPQLRPLLHVVCLIWATCKSYRSPGRLTVLLQEICNLLIQQASNYLSPEDLLRSEVEESQRKLQVVSDTLSFFKQEFQDRRENLHTYFKENQEVKEWDFQSSLVFVRLDGFLGQLHVVEGLLKTALDFHKLGKVEFSGVRGNALSQQVQQMHEEFQEMYRLLSGSSSDCLYLQSTDFENDVSEFNQKVEDLDRRLGTIFIQAFDDAPGLEHAFKLLDIAGNLLERPLVARDTSDKYLVLIQMFNKDLDAVRMIYSQHVQEEAELGFSPVHKNMPTVAGGLRWAQELRQRIQGPFSNFGRITHPCMESAEGKRMQQKYEDMLSLLEKYETRLYEDWCRTVSEKSQYNLSQPLLKRDPETKEITINFNPQLISVLKEMSYLEPREMKHMPETAAAMFSSRDFYRQLVANLELMANWYNKVMKTLLEVEFPLVEEELQNIDLRLRAAEETLNWKTEGICDYVTEITSSIHDLEQRIQKTKDNVEEIQNIMKTWVTPIFKTKDGKRESLLSLDDRHDRMEKYYNLIKESGLKIHALVQENLGLFSADPTSNIWKTYVNSIDNLLLNGFFLAIECSLKYLLENTECKAGLTPIFEAQLSLAIPELVFYPSLESGVKGGFCDIVEGLITSIFRIPSLVPRLSPQNGSPHYQVDLDGIPDLANMRRTLMERVQRMMGLCCGYQSTFSQYSYLYVEDRKEVLGQFLLYGHILTPEEIEDHVEDGIPENPPLLSQFKVQIDSYETLYEEVCRLEPIKVFDGWMKIDIRPFKASLLNIIKRWSLLFKQHLVDHVTHSLANLDAFIKKSESGLLKKVEKGDFQGLVEIMGHLMAVKERQSNTDEMFEPLKQTIELLKTYEQELPETVFKQLEELPEKWNNIKKVAITVKQQVAPLQANEVTLLRQRCTAFDAEQQQFWEQFHKEAPFRFDSIHPHQMLDARHIEIQQMESTMASISESASLFEVNVPDYKQLRQCRKEVCQLKELWDTIGMVTSSIHAWETTPWRNINVEAMELECKQFARHIRNLDKEVRAWDAFTGLESTVWNTLSSLRAVAELQNPAIRERHWRQLMQATGVSFTMDQDTTLAHLLQLQLHHYEDEVRGIVDKAAKEMGMEKTLKELQTTWAGMEFQYEPHPRTNVPLLCSDEDLIEVLEDNQVQLQNLVMSKYVAFFLEEVSGWQKKLSTVDAVISIWFEVQRTWTHLESIFTGSEDIRAQLPQDSKRFEGIDIDFKELAYDAQKIPNVVQTTNKPGLYEKLEDIQGRLCLCEKALAEYLDTKRLAFPRFYFLSSSDLLDILSNGTAPQQVQRHLSKLFDNMAKMRFQLDASGEPTKTSLGMYSKEEEYVAFSEPCDCSGQVEIWLNHVLGHMKATVRHEMTEGVTAYEEKPREQWLFDHPAQVALTCTQIWWTTEVGMAFARLEEGYESAMKDYYKKQVAQLKTLITMLIGQLSKGDRQKIMTICTIDVHARDVVAKMIAQKVDNAQAFLWLSQLRHRWDDEVKHCFANICDAQFLYSYEYLGNTPRLVITPLTDRCYITLTQSLHLTMSGAPAGPAGTGKTETTKDLGRALGILVYVFNCSEQMDYKSCGNIYKGLAQTGAWGCFDEFNRISVEVLSVVAVQVKSIQDAIRDKKQWFSFLGEEISLNPSVGIFITMNPGYAGRTELPENLKSLFRPCAMVVPDFELICEIMLVAEGFIEAQSLARKFITLYQLCKELLSKQDHYDWGLRAIKSVLVVAGSLKRGDPDRPEDQVLMRSLRDFNIPKIVTDDMPIFMGLIGDLFPALDVPRRRDPNFEALVRKAIVDLKLQAEDNFVLKVVQLEELLAVRHSVFVVGGAGTGKSQVLRSLHKTYQIMKRRPVWTDLNPKAVTNDELFGIINPATGEWKDGLFSSIMRELANITHDGPKWILLDGDIDPMWIESLNTVMDDNKVLTLASNERIPLNPTMKLLFEISHLRTATPATVSRAGILYINPADLGWNPPVSSWIEKREIQTERANLTILFDKYLPTCLDTLRTRFKKIIPIPEQSMVQMVCHLLECLLTTEDIPADCPKEIYEHYFVFAAIWAFGGAMVQDQLVDYRAEFSKWWLTEFKTVKFPSQGTIFDYYIDPETKKFEPWSKLVPQFEFDPEMPLQACLVHTSETIRVCYFMERLMARQRPVMLVGTAGTGKSVLVGAKLASLDPEAYLVKNVPFNYYTTSAMLQAVLEKPLEKKAGRNYGPPGNKKLIYFIDDMNMPEVDAYGTVQPHTIIRQHLDYGHWYDRSKLSLKEITNVQYVSCMNPTAGSFTINPRLQRHFSVFVLSFPGADALSSIYSIILTQHLKLGNFPASLQKSIPPLIDLALAFHQKIATTFLPTGIKFHYIFNLRDFANIFQGILFSSVECVKSTWDLIRLYLHESNRVYRDKMVEEKDFDLFDKIQTEVLKKTFDDIEDPVEQTQSPNLYCHFANGIGEPKYMPVQSWELLTQTLVEALENHNEVNTVMDLVLFEDAMRHVCHINRILESPRGNALLVGVGGSGKQSLTRLAAFISSMDVFQITLRKGYQIQDFKMDLASLCLKAGVKNLNTVFLMTDAQVADERFLVLINDLLASGEIPDLYSDDEVENIISNVRNEVKSQGLVDNRENCWKFFIDRIRRQLKVTLCFSPVGNKLRVRSRKFPAIVNCTAIHWFHEWPQQALESVSLRFLQNTEGIEPTVKQSISKFMAFVHTSVNQTSQSYLSNEQRYNYTTPKSFLEFIRLYQSLLHRHRKELKCKTERLENGLLKLHSTSAQVDDLKAKLAAQEVELKQKNEDADKLIQVVGVETDKVSREKAMADEEEQKVAVIMLEVKQKQKDCEEDLAKAEPALTAAQAALNTLNKTNLTELKSFGSPPLAVSNVSAAVMVLMAPRGRVPKDRSWKAAKVTMAKVDGFLDSLINFNKENIHENCLKAIRPYLQDPEFNPEFVATKSYAAAGLCSWVINIVRFYEVFCDVEPKRQALNKATADLTAAQEKLAAIKAKIAHLNENLAKLTARFEKATADKLKCQQEAEVTAVTISLANRLVGGLASENVRWADAVQNFKQQERTLCGDILLITAFISYLGFFTKKYRQSLLDRTWRPYLSQLKTPIPVTPALDPLRMLMDDADVAAWQNEGLPADRMSVENATILINCERWPLMVDPQLQGIKWIKNKYGEDLRVTQIGQKGYLQIIEQALEAGAVVLIENLEESIDPVLGPLLGREVIKKGRFIKIGDKECEYNPKFRLILHTKLANPHYQPELQAQATLINFTVTRDGLEDQLLAAVVSMERPDLEQLKSDLTKQQNGFKITLKTLEDSLLSRLSSASGNFLGETVLVENLEITKQTAAEVEKKVQEAKVTEVKINEAREHYRPAAARASLLYFIMNDLSKIHPMYQFSLKAFSIVFQKAVERAAPDESLRERVANLIDSITFSVYQYTIRGLFECDKLTYLAQLTFQILLMNREVNAVELDFLLRSPVQTGTASPVEFLSHQAWGAVKVLSSMEEFSNLDRDIEGSAKSWKKFVESECPEKEKLPQEWKNKTALQRLCMLRAMRPDRMTYALRDFVEEKLGSKYVVGRALDFATSFEESGPATPMFFILSPGVDPLKDVESQGRKLGYTFNNQNFHNVSLGQGQEVVAEAALDLAAKKGHWVILQNIHLVAKWLSTLEKKLEEHSENSHPEFRVFMSAEPAPSPEGHIIPQGILENSIKITNEPPTGMHANLHKALDNFTQDTLEMCSRETEFKSILFALCYFHAVVAERRKFGPQGWNRSYPFNTGDLTISVNVLYNFLEANAKVPYDDLRYLFGEIMYGGHITDDWDRRLCRTYLGEFIRPEMLEGELSLAPGFPLPGNMDYNGYHQYIDAELPPESPYLYGLHPNAEIGFLTQTSEKLFRTVLELQPRDSQARDGAGATREEKVKALLEEILERVTDEFNIPELMAKVEERTPYIVVAFQECGRMNILTREIQRSLRELELGLKGELTMTSHMENLQNALYFDMVPESWARRAYPSTAGLAAWFPDLLNRIKELEAWTGDFTMPSTVWLTGFFNPQSFLTAIMQSTARKNEWPLDQMALQCDMTKKNREEFRSPPREGAYIHGLFMEGACWDTQAGIITEAKLKDLTPPMPVMFIKAIPADKQDCRSVYSCPVYKTSQRGPTYVWTFNLKTKENPSKWVLAGVALLLQI

SEQ ID NO: 135 - protein, 3354 aa, Homo sapiens
MGRHVATSCHVAWLLVLISGCWGQVNRLPFFTNHFFDTYLLISEDTPVGSSVTQLLAQDMDNDPLVFGVSGEEASRFFAVEPDTGVVWLRQPLDRETKSEFTVEFSVSDHQGVITRKVNIQVGDVNDNAPTFHNQPYSVRIPENTPVGTPIFIVNATDPDLGAGGSVLYSFQPPSQFFAIDSARGIVTVIRELDYETTQAYQLTVNATDQDKTRPLSTLANLAIIITDVQDMDPIFINLPYSTNIYEHSPPGTTVRIITAIDQDKGRPRGIGYTIVSGNTNSIFALDYISGVLTLNGLLDRENPLYSHGFILTVKGTELNDDRTPSDATVTTTFNILVIDINDNAPEFNSSEYSVAITELAQVGFALPLFIQVVDKDENLGLNSMFEVYLVGNNSHHFIISPTSVQGKADIRIRVAIPLDYETVDRYDFDLFANESVPDHVGYAKVKITLINENDNRPIFSQPLYNISLYENVTVGTSVLTVLATDNDAGTFGEVSYFFSDDPDRFSLDKDTGLIMLIARLDYELIQRFTLTIIARDGGGEETTGRVRINVLDVNDNVPTFQKDAYVGALRENEPSVTQLVRLRATDEDSPPNNQITYSIVSASAFGSYFDISLYEGYGVISVSRPLDYEQISNGLIYLTVMAMDAGNPPLNSTVPVTIEVFDENDNPPTFSKPAYFVSVVENIMAGATVLFLNATDLDRSREYGQESIIYSLEGSTQFRINARSGEITTTSLLDRETKSEYILIVRAVDGGVGHNQKTGIATVNITLLDINDNHPTWKDAPYYINLVEMTPPDSDVTTVVAVDPDLGENGTLVYSIQPPNKFYSLNSTTGKIRTTHAMLDRENPDPHEAELMRKIVVSVTDCGRPPLKATSSATVFVNLLDLNDNDPTFQNLPFVAEVLEGIPAGVSIYQVVAIDLDEGLNGLVSYRMPVGMPRMDFLINSSSGVVVTTTELDRERIAEYQLRVVASDAGTPTKSSTSTLTIHVLDVNDETPTFFPAVYNVSVSEDVPREFRVVWLNCTDNDVGLNAELSYFITGGNVDGKFSVGYRDAVVRTVVGLDRETTAAYMLILEAIDNGPVGKRHTGTATVFVTVLDVNDNRPIFLQSSYEASVPEDIPEGHSILQLKATDADEGEFGRVWYRILHGNHGNNFRIHVSNGLLMRGPRPLDRERNSSHVLIVEAYNHDLGPMRSSVRVIVYVEDINDEAPVFTQQQYSRLGLRETAGIGTSVIVVQATDRDSGDGGLVNYRILSGAEGKFEIDESTGLIITVNYLDYETKTSYMMNVSATDQAPPFNQGFCSVYITLLNELDEAVQFSNASYEAAILENLALGTEIVRVQAYSIDNLNQITYRFDAYTSTQAKALFKIDAITGVITVQGLVDREKGDFYTLTVVADDGGPKVDSTVKVYITVLDENDNSPRFDFTSDSAVSIPEDCPVGQRVATVKAWDPDAGSNGQVVFSLASGNIAGAFEIVTTNDSIGEVFVARPLDREELDHYILQVVASDRGTPPRKKDHILQVTILDINDNPPVIESPFGYNVSVNENVGGGTAVVQVRATDRDIGINSVLSYYITEGNKDMAFRMDRISGEIATRPAPPDRERQSFYHLVATVEDEGTPTLSATTHVYVTIVDENDNAPMFQQPHYEVLLDEGPDTLNTSLITIQALDLDEGPNGTVTYAIVAGNIVNTFRIDRHMGVITAAKELDYEISHGRYTLIVTATDQCPILSHRLTSTTTVLVNVNDINDNVPTFPRDYEGPFEVTEGQPGPRVWTFLAHDRDSGPNGQVEYSIMDGDPLGEFVISPVEGVLRVQKDVELDRETIAFYNLTICARDRGMPPLSSTMLVGIRVLDINDNDPVLLNLPMNITISENSPVSSFVAHVLASDADSGCNARLTFNITAGNRERAFFINATTGIVTVNRPLDRERIPEYKLTISVKDNPENPRIARRDYDLLLIFLSDENDNHPLFTKSTYQAEVMENSPAGTPLTVLNGPILALDADQDIYAVVTYQLLGAQSGLFDINSSTGVVTVRSGVIIDREAFSPPILELLLLAKDIGLLNSTAHLLITILDDNDNRPTFSPATLTVHLLENCPPGFSVLQVTATDEDSGLNGELVYRIEAGAQDRFLIHLVTGVIRVGNATIDREEQESYRLTVVATDRGTVPLSGTAIVTILIDDINDSRPEFLNPIQTVSVLESAEPGTVIANITAIDHDLNPKLEYHIVGIVAKDDTDRLVPNQEDAFAVNINTGSVMVKSPMNRELVATYEVTLSVIDNASDLPERSVSVPNAKLTVNVLDVNDNTPQFKPFGITYYMERILEGATPGTTLIAVAAVDPDKGLNGLVTYTLLDLVPPGYVQLEDSSAGKVIANQTVDYEEVHWLNFTVRASDNGSLPRAAEIPVYLEIVDINDNNPIFDQPSYQEAVFEDVPVGTIILTVTATDADSGNFALIEYSLGDGESKFAINPTTGDIYVLSSLDREKKDHYILTALAKDNPGDVASNRRENSVQVVIQVLDVNDCRPQFSKPQFSTSVYENEPAGTSVITMMATDQDEGPNGELTYSLEGPGVEAFHVDMDSGLVTTQRPLQSYEKFSLTVVATDGGEPPLWGTTMLLVEVIDVNDNRPVFVRPPNGTILHIREEIPLRSNVYEVYATDKDEGLNGAVRYSFLKTAGNRDWEFFIIDPISGLIQTAQRLDRESQAVYSLILVASDLGQPVPYETMQPLQVALEDIDDNEPLFVRPPKGSPQYQLLTVPEHSPRGTLVGNVTGAVDADEGPNAIVYYFIAAGNEEKNFHLQPDGCLLVLRDLDREREAIFSFIVKASSNRSWTPPRGPSPTLDLVADLTLQEVRVVLEDINDQPPRFTKAEYTAGVATDAKVGSELIQVLALDADIGNNSLVFYSILAIHYFRALANDSEDVGQVFTMGSMDGILRTFDLFMAYSPGYFVVDIVARDLAGHNDTAIIGIYILRDDQRVKIVINEIPDRVRGFEEEFIHLLSNITGAIVNTDNVQFHVDKKGRVNFAQTELLIHVVNRDTNRILDVDRVIQMIDENKEQLRNLFRNYNVLDVQPAISVRLPDDMSALQMAIIVLAILLFLAAMLFVLMNWYYRTVHKRKLKAIVAGSAGNRGFIDIMDMPNTNKYSFDGANPVWLDPFCRNLELAAQAEHEDDLPENLSEIADLWNSPTRTHGTFGREPAAVKPDDDRYLRAAIQEYDNIAKLGQIIREGPIKGSLLKVVLEDYLRLKKLFAQRMVQKASSCHSSISELIQTELDEEPGDHSPGQGSLRFRHKPPVELKGPDGIHVVHGSTGTLLATDLNSLPEEDQKGLGRSLETLTAAEATAFERNARTESAKSTPLHKLRDVIMETPLEITEL

SEQ ID NO: 136 - protein, 5596 aa, Homo sapiens
MEHFLLEVAAAPLRLIAAKNEKSRSELGRFLAKQVWTPQDRQCVLSTLAQLLLDKDCTVLVGRQLRPLLLDLLERNAEAIKAGGQINHDLHERLCVSMSKLIGNHPDVLPFALRYFKDTSPVFQRLFLESSDANPVRYGRRRMKLRDLMEAAFKFLQQEQSVFRELWDWSVCVPLLRSHDTLVRWYTANCLALVTCMNEEHKLSFLKKIFNSDELIHFRLRLLEEAQLQDLEKALVLANPEVSLWRKQKELQYLQGHLVSSDLSPRVTAVCGVVLPGQLPAPGELGGNRSSSREQELALRSYVLVESVCKSLQTLAMAVASQNAVLLEGPIGCGKTSLVEYLAAVTGRTKPPQLLKVQLGDQTDSKMLLGMYRCTDVPGEFVWQPGTLTQAATMGHWILLEDIDYAPLDVVSVLIPLLENGELLIPGRGDCLKVAPGFQFFATRRLLSCGGNWYRPLNSHATLLDKYWTKIHLDNLDKRELNEVLQSRYPSLLAVVDHLLDIYIQLTGEKHHSWSDSSVGCEQAPEEVSEARRENKRPTLEGRELSLRDLLNWCNRIAHSFDSSSLSASLNIFQEALDCFTAMLSEHTSKLKMAEVIGSKLNISRKKAEFFCQLYKPEIVINELDLQVGRVRLLRKQSEAVHLQREKFTFAATRPSSVLIEQLAVCVSKGEPVLLVGETGTGKTSTIQYLAHITGHRLRVVNMNQQSDTADLLGGYKPVDHKLIWLPLREAFEELFAQTFSKKQNFTFLGHIQTCYRQKRWHDLLRLMQHVHKSAVNKDGKDSETGLLIKEKWEAFGLRLNHAQQQMKMTENTLLFAFVEGTLAQAVKKGEWILLDEINLAAPEILECLSGLLEGSSGSLVLLDRGDTEPLVRHPDFRLFACMNPATDVGKRNLPPGIRNRFTELYVEELESKEDLQVLIVDYLKGLSVNKNTVQGIINFYTALRKESGTKLVDGTGHRPHYSLRTLCRALRFAASNPCGNIQRSLYEGFCLGFLTQLDRASHPIVQKLICQHIVPGNVKSLLKQPIPEPKGGRLIQVEGYWIAVGDKEPTIDETYILTSSVKLNLRDIVRVVSAGTYPVLIQGETSVGKTSLIQWLAAATGNHCVRINNHEHTDIQEYIGCYTSDSSGKLVFKEGVLIDAMRKGYWIILDELNLAPTDVLEALNRLLDDNRELLVTETQEVVKAHPRFMLFATQNPPGLYGGRKVLSRAFRNRFVELHFDELPSSELETILHKRCSLPPSYCSKLVKVMLDLQSYRRSSSVFAGKQGFITLRDLFRWAERYRLAEPTEKEYDWLQHLANDGYMLLAGRVRKQEEIDVIQEVLEKHFKKKLCPQSLFSKENVLKLLGKLSTQISTLECNFGHIVWTEGMRRLAMLVGRALEFGEPVLLVGDTGCGKTTICQVFAALANQKLYSVSCHLHMETSDFLGGLRPVRQKPNDKEEIDTSRLFEWHDGPLVQAMKEDGFFLLDEISLADDSVLERLNSVLEVEKSLVLAEKGSPEDKDSEIELLTAGKKFRILATMNPGGDFGKKELSPALRNRFTEIWCPQSTSREDLIQIISHNLRPGLCLGRIDPKGSDIPEVMLDFIDWLTHQEFGRKCVVSIRDILSWVNFMNKMGEEAALKRPEIISTVTSFVHAACLVYIDGIGSGVTSSGFGTALLARKECLKFLIKRLAKIVRLTEYQKNELKIYDRMKAKEFTGIDNLWGIHPFFIPRGPVLHRNNIADYALSAGTTAMNAQRLLRATKLKKPILLEGSPGVGKTSLVGALAKASGNTLVRINLSEQTDITDLFGADLPVEGGKGGEFAWRDGPLLAALKAGHWVVLDELNLASQSVLEGLNACFDHRGEIYVPELGMSFQVQHEKTKIFGCQNPFRQGGGRKGLPRSFLNRFTQVFVDPLTVIDMEFIASTLFPAIEKNIVKKMVAFNNQIDHEVTVEKKWGQKGGPWEFNLRDLFRWCQLMLVDQSPGCYDPGQHVFLVYGERMRTEEDKKKVIAVFKDVFGSNSNPYMGTRLFRITPYDVQLGYSVLSRGSCVPHPSRHPLLLLHQSFQPLESIMKCVQMSWMVILVGPASVGKTSLVQLLAHLTGHTLKIMAMNSAMDTTELLGGFEQVDLIRPWRRLLEKVEGTVRALLRDSLLISADDAEVVLRAWSHFLLTYKPKCLGEGGKAITMEIVNKLEAVLLLMQRLNNKINSYCKAEFAKLVEEFRSFGVKLTQLASGHSHGTFEWVDSMLVQALKSGDWLLMDNVNFCNPSVLDRLNALLEPGGVLTISERGMIDGSTPTITPNPNFRLFLSMDPVHGDISRAMRNRGLEIYISGEGDASTPDNLDLKVLLHSLGLVGNSVCDILLALHTETRSTVVGSPTSSVSTLIQTAILIVQYLQRGLSLDRAFSEACWEVYVCSQHSPANRKLVQALLEKHVSSLRAHETWGDSILGMGLWPDSVPSALFATEDSHLSTVRRDGQILVYCLNRMSMKTSSWTRSQPFTLQDLEKIMQSPSPENLKFNAVEVNTYWIDEPDVLVMAVKLLIERATNQDWMLRVKWLYHLAKNIPQGLESIQIHLEASAASLRNFYSHSLSGAVSNVFKILQPNTTDEFVIPLDPRWNMQALDMIRNLMDFDPQTDQPDQLFALLESAANKTIIYLDREKRVFTEANLVSVGSKKLRESVLRMSFEFHQDPESYHTLPHEIVVNLAAFFELCDALVLLWVQSSQGMVSDASANEILGSLRWRDRFWTVADTVKVDAPGLALLALHWHWVLKHLVHQIPRLLMNYEDKYYKEVQTVSEHIQNCLGSQTGGFAGIKKLQKFLGRPFPFKDKLVVECFSQLKVLNKVLAIREQMSALGESGWQEDINRLQVVASQWTLKKSLLQAWGLILRANILEDVSLDELKNFVHAQCLELKAKGLSLGFLEKKHDEASSLSHPDLTSVIHLTRSVQLWPAMEYLAMLWRYKVTADFMAQACLRRCSKNQQPQINEEISHLISFCLYHTPVTPQELRDLWSLLHHQKVSPEEITSLWSELFNSMFMSFWSSTVTTNPEYWLMWNPLPGMQQREAPKSVLDSTLKGPGNLNRPIFSKCCFEVLTSSWRASPWDVSGLPILSSSHVTLGEWVERTQQLQDISSMLWTNMAISSVAEFRRTDSQLQGQVLFRHLAGLAELLPESRRQEYMQNCEQLLLGSSQAFQHVGQTLGDMAGQEVLPKELLCQLLTSLHHFVGEGESKRSLPEPAQRGSLWVSLGLLQIQTWLPQARFDPAVKREYKLNYVKEELHQLQCEWKTRNLSSQLQTGRDLEDEVVVSYSHPHVRLLRQRMDRLDNLTCHLLKKQAFRPQLPAYESLVQEIHHYVTSIAKAPAVQDLLTRLLQALHIDGPRSAQVAQSLLKEEASWQQSHHQFRKRLSEEYTFYPDAVSPLQASILQLQHGMRLVASELHTSLHSSMVGADRLGTLATALLAFPSVGPTFPTYYAHADTLCSVKSEEVLRGLGKLILKRSGGKELEGKGQKACPTREQLLMNALLYLRSHVLCKGELDQRALQLFRHVCQEIISEWDEQERIAQEKAEQESGLYRYRSRNSRTALSEEEEEEREFRKQFPLHEKDFADILVQPTLEENKGTSDGQEEEAGTNPALLSQNSMQAVMLIHQQLCLNFARSLWYQQTLPPHEAKHYLSLFLSCYQTGASLVTHFYPLMGVELNDRLLGSQLLACTLSHNTLFGEAPSDLMVKPDGPYDFYQHPNVPEARQCQPVLQGFSEAVSHLLQDWPEHPALEQLLVVMDRIRSFPLSSPISKFLNGLEILLAKAQDWEENASRALSLRKHLDLISQMIIRWRKLELNCWSMSLDNTMKRHTEKSTKHWFSIYQMLEKHMQEQTEEQEDDKQMTLMLLVSTLQAFIEGSSLGEFHVRLQMLLVFHCHVLLMPQVEGKDSLCSVLWNLYHYYKQFFDRVQAKIVELRSPLEKELKEFVKISKWNDVSFWSIKQSVEKTHRTLFKFMKKFEAVLSEPCRSSLVESDKEEQPDFLPRPTDGAASELSSIQNLNRALRETLLAQPAAGQATIPEWCQGAAPSGLEGELLRRLPKLRKRMRKMCLTFMKESPLPRLVEGLDQFTGEVISSVSELQSLKVEPSAEKEKQRSEAKHILMQKQRALSDLFKHLAKIGLSYRKGLAWARSKNPQEMLHLHPLDLQSALSIVSSTQEADSRLLTEISSSWDGCQKYFYRSLARHARLNAALATPAKEMGMGNVERCRGFSAHLMKMLVRQRRSLTTLSEQWIILRNLLSCVQEIHSRLMGPQAYPVAFPPQDGVQQWTERLQHLAMQCQILLEQLSWLLQCCPSVGPAPGHGNVQVLGQPPGPCLEGPELSKGQLCGVVLDLIPSNLSYPSPIPGSQLPSGCRMRKQDHLWQQSTTRLTEMLKTIKTVKADVDKIRQQSCETLFHSWKDFEVCSSALSCLSQVSVHLQGLESLFILPGMEVEQRDSQMALVESLEYVRGEISKAMADFTTWKTHLLTSDSQGGNQMLDEGFVEDFSEQMEIAIRAILCAIQNLEERKNEKAEENTDQASPQEDYAGFERLQSGHLTKLLEDDFWADVSTLHVQKIISAISELLERLKSYGEDGTAAKHLFFSQSCSLLVRLVPVLSSYSDLVLFFLTMSLATHRSTAKLLSVLAQVFTELAQKGFCLPKEFMEDSAGEGATEFHDYEGGGIGEGEGMKDVSDQIGNEEQVEDTFQKGQEKDKEDPDSKSDIKGEDNAIEMSEDFDGKMHDGELEEQEEDDEKSDSEGGDLDKHMGDLNGEEADKLDERLWGDDDEEEDEEEEDNKTEETGPGMDEEDSELVAKDDNLDSGNSNKDKSQQDKKEEKEEAEADDGGQGEDKINEQIDERDYDENEVDPYHGNQEKVPEPEALDLPDDLNLDSEDKNGGEDTDNEEGEEENPLEIKEKPEEAGHEAEERGETETDQNESQSPQEPEEGPSEDDKAEGEEEMDTGADDQDGDAAQHPEEHSEEQQQSVEEKDKEADEEGGENGPADQGFQPQEEEEREDSDTEEQVPEALERKEHASCGQTGVENMQNTQAMELAGAAPEKEQGKEEHGSGAADANQAEGHESNFIAQLASQKHTRKNTQSFKRKPGQADNERSMGDHNERVHKRLRTVDTDSHAEQGPAQQPQAQVEDADAFEHIKQGSDAYDAQTYDVASKEQQQSAKDSGKDQEEEEIEDTLMDTEEQEEFKAADVEQLKPEEIKSGTTAPLGFDEMEVEIQTVKTEEDQDPRTDKAHKETENEKPERSRESTIHTAHQFLMDTIFQPFLKDVNELRQELERQLEMWQPRESGNPEEEKVAAEMWQSYLILTAPLSQRLCEELRLILEPTQAAKLKGDYRTGKRLNIRKVIPYIASQFRKDKIWLRRTKPSKRQYQICLAIDDSSSMVDNHTKQLAFESLAVIGNALTLLEVGQIAVCSFGESVKLLHPFHEQFSDYSGSQILRLCKFQQKKTKIAQFLESVANMFAAAQQLSQNISSETAQLLLVVSDGRGLFLEGKERVLAAVQAARNANIFVIFVVLDNPSSRDSILDIKVPIFKGPGEMPEIRSYMEEFPFPYYIILRDVNALPETLSDALRQWFELVTASDHP

SEQ ID NO: 137 - protein, 2365 aa, Homo sapiens
MEEVPGDALCEHFEANILTQNRCQNCFHPEEAHGARYQELRSPSGAEVPYCDLPRCPPAPEDPLSASTSGCQSVVDPGLRPGPKRGPSPSAGLPEEGPTAAPRSRSRELEAVPYLEGLTTSLCGSCNEDPGSDPTSSPDSATPDDTSNSSSVDWDTVERQEEEAPSWDELAVMIPRRPREGPRADSSQRAPSLLTRSPVGGDAAGQKKEDTGGGGRSAGQHWARLRGESGLSLERHRSTLTQASSMTPHSGPRSTTSQASPAQRDTAQAASTREIPRASSPHRITQRDTSRASSTQQEISRASSTQQETSRASSTQEDTPRASSTQEDTPRASSTQWNTPRASSPSRSTQLDNPRTSSTQQDNPQTSFPTCTPQRENPRTPCVQQDDPRASSPNRTTQRENSRTSCAQRDNPKASRTSSPNRATRDNPRTSCAQRDNPRASSPSRATRDNPTTSCAQRDNPRASRTSSPNRATRDNPRTSCAQRDNPRASSPSRATRDNPTTSCAQRDNPRASRTSSPNRATRDNPRTSCAQRDNPRASSPNRAARDNPTTSCAQRDNPRASRTSSPNRATRDNPRTSCAQRDNPRASSPNRATRDNPTTSCAQRDNPRASRTSSPNRATRDNPRTSCAQRDNPRASSPNRTTQQDSPRTSCARRDDPRASSPNRTIQQENPRTSCALRDNPRASSPSRTIQQENPRTSCAQRDDPRASSPNRTTQQENPRTSCARRDNPRASSRNRTIQRDNPRTSCAQRDNPRASSPNRTIQQENLRTSCTRQDNPRTSSPNRATRDNPRTSCAQRDNLRASSPIRATQQDNPRTCIQQNIPRSSSTQQDNPKTSCTKRDNLRPTCTQRDRTQSFSFQRDNPGTSSSQCCTQKENLRPSSPHRSTQWNNPRNSSPHRTNKDIPWASFPLRPTQSDGPRTSSPSRSKQSEVPWASIALRPTQGDRPQTSSPSRPAQHDPPQSSFGPTQYNLPSRATSSSHNPGHQSTSRTSSPVYPAAYGAPLTSPEPSQPPCAVCIGHRDAPRASSPPRYLQHDPFPFFPEPRAPESEPPHHEPPYIPPAVCIGHRDAPRASSPPRHTQFDPFPFLPDTSDAEHQCQSPQHEPLQLPAPVCIGYRDAPRASSPPRQAPEPSLLFQDLPRASTESLVPSMDSLHECPHIPTPVCIGHRDAPSFSSPPRQAPEPSLFFQDPPGTSMESLAPSTDSLHGSPVLIPQVCIGHRDAPRASSPPRHPPSDLAFLAPSPSPGSSGGSRGSAPPGETRHNLEREEYTVLADLPPPRRLAQRQPGPQAQCSSGGRTHSPGRAEVERLFGQERRKSEAAGAFQAQDEGRSQQPSQGQSQLLRRQSSPAPSRQVTMLPAKQAELTRRSQAEPPHPWSPEKRPEGDRQLQGSPLPPRTSARTPERELRTQRPLESGQAGPRQPLGVWQSQEEPPGSQGPHRHLERSWSSQEGGLGPGGWWGCGEPSLGAAKAPEGAWGGTSREYKESWGQPEAWEEKPTHELPRELGKRSPLTSPPENWGGPAESSQSWHSGTPTAVGWGAEGACPYPRGSERRPELDWRDLLGLLRAPGEGVWARVPSLDWEGLLELLQARLPRKDPAGHRDDLARALGPELGPPGTNDVPEQESHSQPEGWAEATPVNGHSPALQSQSPVQLPSPACTSTQWPKIKVTRGPATATLAGLEQTGPLGSRSTAKGPSLPELQFQPEEPEESEPSRGQDPLTDQKQADSADKRPAEGKAGSPLKGRLVTSWRMPGDRPTLFNPFLLSLGVLRWRRPDLLNFKKGWMSILDEPGEPPSPSLTTTSTSQWKKHWFVLTDSSLKYYRDSTAEEADELDGEIDLRSCTDVTEYAVQRNYGFQIHTKDAVYTLSAMTSGIRRNWIEALRKTVRPTSAPDVTKLSDSNKENALHSYSTQKGPLKAGEQRAGSEVISRGGPRKADGQRQALDYVELSPLTQASPQRARTPARTPDRLAKQEELERDLAQRSEERRKWFEATDSRTPEVPAGEGPRRGLGAPLTEDQQNRLSEEIEKKWQELEKLPLRENKRVPLTALLNQSRGERRGPPSDGHEALEKEVQALRAQLEAWRLQGEAPQSALRSQEDGHIPPGYISQEACERSLAEMESSHQQVMEELQRHHERELQRLQQEKEWLLAEETAATASAIEAMKKAYQEELSRELSKTRSLQQGPDGLRKQHQSDVEALKRELQVLSEQYSQKCLEIGALMRQAEEREHTLRRCQQEGQELLRHNQELHGRLSEEIDQLRGFIASQGMGNGCGRSNERSSCELEVLLRVKENELQYLKKEVQCLRDELQMMQKDKRFTSGKYQDVYVELSHIKTRSEREIEQLKEHLRLAMAALQEKESMRNSLAE

SEQ ID NO: 138 - protein, 4967 aa, Homo sapiens
MADGGEGEDEIQFLRTDDEVVLQCTATIHKEQQKLCLAAEGFGNRLCFLESTSNSKNVPPDLSICTFVLEQSLSVRALQEMLANTVEKSEGQVDVEKWKFMMKTAQGGGHRTLLYGHAILLRHSYSGMYLCCLSTSRSSTDKLAFDVGLQEDTTGEACWWTIHPASKQRSEGEKVRVGDDLILVSVSSERYLHLSYGNGSLHVDAAFQQTLWSVAPISSGSEAAQGYLIGGDVLRLLHGHMDECLTVPSGEHGEEQRRTVHYEGGAVSVHARSLWRLETLRVAWSGSHIRWGQPFRLRHVTTGKYLSLMEDKNLLLMDKEKADVKSTAFTFRSSKEKLDVGVRKEVDGMGTSEIKYGDSVCYIQHVDTGLWLTYQSVDVKSVRMGSIQRKAIMHHEGHMDDGISLSRSQHEESRTARVIRSTVFLFNRFIRGLDALSKKAKASTVDLPIESVSLSLQDLIGYFHPPDEHLEHEDKQNRLRALKNRQNLFQEEGMINLVLECIDRLHVYSSAAHFADVAGREAGESWKSILNSLYELLAALIRGNRKNCAQFSGSLDWLISRLERLEASSGILEVLHCVLVESPEALNIIKEGHIKSIISLLDKHGRNHKVLDVLCSLCVCHGVAVRSNQHLICDNLLPGRDLLLQTRLVNHVSSMRPNIFLGVSEGSAQYKKWYYELMVDHTEPFVTAEATHLRVGWASTEGYSPYPGGGEEWGGNGVGDDLFSYGFDGLHLWSGCIARTVSSPNQHLLRTDDVISCCLDLSAPSISFRINGQPVQGMFENFNIDGLFFPVVSFSAGIKVRFLLGGRHGEFKFLPPPGYAPCYEAVLPKEKLKVEHSREYKQERTYTRDLLGPTVSLTQAAFTPIPVDTSQIVLPPHLERIREKLAENIHELWVMNKIELGWQYGPVRDDNKRQHPCLVEFSKLPEQERNYNLQMSLETLKTLLALGCHVGISDEHAEDKVKKMKLPKNYQLTSGYKPAPMDLSFIKLTPSQEAMVDKLAENAHNVWARDRIRQGWTYGIQQDVKNRRNPRLVPYTLLDDRTKKSNKDSLREAVRTLLGYGYNLEAPDQDHAARAEVCSGTGERFRIFRAEKTYAVKAGRWYFEFETVTAGDMRVGWSRPGCQPDQELGSDERAFAFDGFKAQRWHQGNEHYGRSWQAGDVVGCMVDMNEHTMMFTLNGEILLDDSGSELAFKDFDVGDGFIPVCSLGVAQVGRMNFGKDVSTLKYFTICGLQEGYEPFAVNTNRDITMWLSKRLPQFLQVPSNHEHIEVTRIDGTIDSSPCLKVTQKSFGSQNSNTDIMFYRLSMPIECAEVFSKTVAGGLPGAGLFGPKNDLEDYDADSDFEVLMKTAHGHLVPDRVDKDKEATKPEFNNHKDYAQEKPSRLKQRFLLRRTKPDYSTSHSARLTEDVLADDRDDYDFLMQTSTYYYSVRIFPGQEPANVWVGWITSDFHQYDTGFDLDRVRTVTVTLGDEKGKVHESIKRSNCYMVCAGESMSPGQGRNNNGLEIGCVVDAASGLLTFIANGKELSTYYQVEPSTKLFPAVFAQATSPNVFQFELGRIKNVMPLSAGLFKSEHKNPVPQCPPRLHVQFLSHVLWSRMPNQFLKVDVSRISERQGWLVQCLDPLQFMSLHIPEENRSVDILELTEQEELLKFHYHTLRLYSAVCALGNHRVAHALCSHVDEPQLLYAIENKYMPGLLRAGYYDLLIDIHLSSYATARLMMNNEYIVPMTEETKSITLFPDENKKHGLPGIGLSTSLRPRMQFSSPSFVSISNECYQYSPEFPLDILKSKTIQMLTEAVKEGSLHARDPVGGTTEFLFVPLIKLFYTLLIMGIFHNEDLKHILQLIEPSVFKEAATPEEESDTLEKELSVDDAKLQGAGEEEAKGGKRPKEGLLQMKLPEPVKLQMCLLLQYLCDCQVRHRIEAIVAFSDDFVAKLQDNQRFRYNEVMQALNMSAALTARKTKEFRSPPQEQINMLLNFKDDKSECPCPEEIRDQLLDFHEDLMTHCGIELDEDGSLDGNSDLTIRGRLLSLVEKVTYLKKKQAEKPVESDSKKSSTLQQLISETMVRWAQESVIEDPELVRAMFVLLHRQYDGIGGLVRALPKTYTINGVSVEDTINLLASLGQIRSLLSVRMGKEEEKLMIRGLGDIMNNKVFYQHPNLMRALGMHETVMEVMVNVLGGGESKEITFPKMVANCCRFLCYFCRISRQNQKAMFDHLSYLLENSSVGLASPAMRGSTPLDVAAASVMDNNELALALREPDLEKVVRYLAGCGLQSCQMLVSKGYPDIGWNPVEGERYLDFLRFAVFCNGESVEENANVVVRLLIRRPECFGPALRGEGGNGLLAAMEEAIKIAEDPSRDGPSPNSGSSKTLDTEEEEDDTIHMGNAIMTFYSALIDLLGRCAPEMHLIHAGKGEAIRIRSILRSLIPLGDLVGVISIAFQMPTIAKDGNVVEPDMSAGFCPDHKAAMVLFLDRVYGIEVQDFLLHLLEVGFLPDLRAAASLDTAALSATDMALALNRYLCTAVLPLLTRCAPLFAGTEHHASLIDSLLHTVYRLSKGCSLTKAQRDSIEVCLLSICGQLRPSMMQHLLRRLVFDVPLLNEHAKMPLKLLTNHYERCWKYYCLPGGWGNFGAASEEELHLSRKLFWGIFDALSQKKYEQELFKLALPCLSAVAGALPPDYMESNYVSMMEKQSSMDSEGNFNPQPVDTSNITIPEKLEYFINKYAEHSHDKWSMDKLANGWIYGEIYSDSSKVQPLMKPYKLLSEKEKEIYRWPIKESLKTMLAWGWRIERTREGDSMALYNRTRRISQTSQVSVDAAHGYSPRAIDMSNVTLSRDLHAMAEMMAENYHNIWAKKKKMELESKGGGNHPLLVPYDTLTAKEKAKDREKAQDILKFLQINGYAVSRGFKDLELDTPSIEKRFAYSFLQQLIRYVDEAHQYILEFDGGSRGKGEHFPYEQEIKFFAKVVLPLIDQYFKNHRLYFLSAASRPLCSGGHASNKEKEMVTSLFCKLGVLVRHRISLFGNDATSIVNCLHILGQTLDARTVMKTGLESVKSALRAFLDNAAEDLEKTMENLKQGQFTHTRNQPKGVTQIINYTTVALLPMLSSLFEHIGQHQFGEDLILEDVQVSCYRILTSLYALGTSKSIYVERQRSALGECLAAFAGAFPVAFLETHLDKHNIYSIYNTKSSRERAALSLPTNVEDVCPNIPSLEKLMEEIVELAESGIRYTQMPHVMEVILPMLCSYMSRWWEHGPENNPERAEMCCTALNSEHMNTLLGNILKIIYNNLGIDEGAWMKRLAVFSQPIINKVKPQLLKTHFLPLMEKLKKKAATVVSEEDHLKAEARGDMSEAELLILDEFTTLARDLYAFYPLLIRFVDYNRAKWLKEPNPEAEELFRMVAEVFIYWSKSHNFKREEQNFVVQNEINNMSFLITDTKSKMSKAAVSDQERKKMKRKGDRYSMQTSLIVAALKRLLPIGLNICAPGDQELIALAKNRFSLKDTEDEVRDIIRSNIHLQGKLEDPAIRWQMALYKDLPNRTDDTSDPEKTVERVLDIANVLFHLEQKSKRVGRRHYCLVEHPQRSKKAVWHKLLSKQRKRAVVACFRMAPLYNLPRHRAVNLFLQGYEKSWIETEEHYFEDKLIEDLAKPGAEPPEEDEGTKRVDPLHQLILLFSRTALTEKCKLEEDFLYMAYADIMAKSCHDEEDDDGEEEVKSFEEKEMEKQKLLYQQARLHDRGAAEMVLQTISASKGETGPMVAATLKLGIAILNGGNSTVQQKMLDYLKEKKDVGFFQSLAGLMQSCSVLDLNAFERQNKAEGLGMVTEEGSGEKVLQDDEFTCDLFRFLQLLCEGHNSDFQNYLRTQTGNNTTVNIIISTVDYLLRVQESISDFYWYYSGKDVIDEQGQRNFSKAIQVAKQVFNTLTEYIQGPCTGNQQSLAHSRLWDAVVGFLHVFAHMQMKLSQDSSQIELLKELMDLQKDMVVMLLSMLEGNVVNGTIGKQMVDMLVESSNNVEMILKFFDMFLKLKDLTSSDTFKEYDPDGKGVISKRDFHKAMESHKHYTQSETEFLLSCAETDENETLDYEEFVKRFHEPAKDIGFNVAVLLTNLSEHMPNDTRLQTFLELAESVLNYFQPFLGRIEIMGSAKRIERVYFEISESSRTQWEKPQVKESKRQFIFDVVNEGGEKEKMELFVNFCEDTIFEMQLAAQISESDLNERSANKEESEKERPEEQGPRMAFFSILTVRSALFALRYNILTLMRMLSLKSLKKQMKKVKKMTVKDMVTAFFSSYWSIFMTLLHFVASVFRGFFRIICSLLLGGSLVEGAKKIKVAELLANMPDPTQDEVRGDGEEGERKPLEAALPSEDLTDLKELTEESDLLSDIFGLDLKREGGQYKLIPHNPNAGLSDLMSNPVPMPEVQEKFQEQKAKEEEKEEKEETKSEPEKAEGEDGEKEEKAKEDKGKQKLRQLHTHRYGEPEVPESAFWKKIIAYQQKLLNYFARNFYNMRMLALFVAFAINFILLFYKVSTSSVVEGKELPTRSSSENAKVTSLDSSSHRIIAVHYVLEESSGYMEPTLRILAILHTVISFFCIIGYYCLKVPLVIFKREKEVARKLEFDGLYITEQPSEDDIKGQWDRLVINTQSFPNNYWDKFVKRKVMDKYGEFYGRDRISELLGMDKAALDFSDAREKKKPKKDSSLSAVLNSIDVKYQMWKLGVVFTDNSFLYLAWYMTMSVLGHYNNFFFAAHLLDIAMGFKTLRTILSSVTHNGKQLVLTVGLLAVVVYLYTVVAFNFFRKFYNKSEDGDTPDMKCDDMLTCYMFHMYVGVRAGGGIGDEIEDPAGDEYEIYRIIFDITFFFFVIVILLAIIQGLIIDAFGELRDQQEQVKEDMETKCFICGIGNDYFDTVPHGFETHTLQEHNLANYLFFLMYLINKDETEHTGQESYVWKMYQERCWEFFPAGDCFRKQYEDQLN

SEQ ID NO: 139 - protein, 4314 aa, Homo sapiens
MANGTADVRKLFIFTTTQNYFGLMSELWDQPLLCNCLEINNFLDDGNQMLLRVQRSDAGISFSNTIEFGDTKDKVLVFFKLRPEVITDENLHDNILVSSMLESPISSLYQAVRQVFAPMLLKDQEWSRNFDPKLQNLLSELEAGLGIVLRRSDTNLTKLKFKEDDTRGILTPSDEFQFWIEQAHRGNKQISKERANYFKELFETIAREFYNLDSLSLLEVVDLVETTQDVVDDVWRQTEHDHYPESRMLHLLDIIGGSFGRFVQKKLGTLNLWEDPYYLVKESLKAGISICEQWVIVCNHLTGQVWQRYVPHPWKNEKYFPETLDKLGKRLEEVLAIRTIHEKFLYFLPASEEKIICLTRVFEPFTGLNPVQYNPYTEPLWKAAVSQYEKIIAPAEQKIAGKLKNYISEIQDSPQQLLQAFLKYKELVKRPTISKELMLERETLLARLVDSIKDFRLDFENRCRGIPGDASGPLSGKNLSEVVNSIVWVRQLELKVDDTIKIAEALLSDLPGFRCFHQSAKDLLDQLKLYEQEQFDDWSRDIQSGLSDSRSGLCIEASSRIMELDSNDGLLKVHYSDRLVILLREVRQLSALGFVIPAKIQQVANIAQKFCKQAIILKQVAHFYNSIDQQMIQSQRPMMLQSALAFEQIIKNSKAGSGGKSQITWDNPKELEGYIQKLQNAAERLATENRKLRKWHTTFCEKVVVLMNIDLLRQQQRWKDGLQELRTGLATVEAQGFQASDMHAWKQHWNHQLYKALEHQYQMGLEALNENLPEINIDLTYKQGRLQFRPPFEEIRAKYYREMKRFIGIPNQFKGVGEAGDESIFSIMIDRNASGFLTIFSKAEDLFRRLSAVLHQHKEWIVIGQVDMEALVEKHLFTVHDWEKNFKALKIKGKEVERLPSAVKVDCLNINCNPVKTVIDDLIQKLFDLLVLSLKKSIQAHLHEIDTFVTEAMEVLTIMPQSVEEIGDANLQYSKLQERKPEILPLFQEAEDKNRLLRTVAGGGLETISNLKAKWDKFELMMESHQLMIKDQIEVMKGNVKSRLQIYYQELEKFKARWDQLKPGDDVIETGQHNTLDKSAKLIKEKKIEFDDLEVTRKKLVDDCHHFRLEEPNFSLASSISKDIESCAQIWAFYEEFQQGFQEMANEDWITFRTKTYLFEEFLMNWHDRLRKVEEHSVMTVKLQSEVDKYKIVIPILKYVRGEHLSPDHWLDLFRLLGLPRGTSLEKLLFGDLLRVADTIVAKAADLKDLNSRAQGEVTIREALRELDLWGVGAVFTLIDYEDSQSRTMKLIKDWKDIVNQVGDNRCLLQSLKDSPYYKGFEDKVSIWERKLAELDEYLQNLNHIQRKWVYLEPIFGRGALPKEQTRFNRVDEDFRSIMTDIKKDNRVTTLTTHAGIRNSLLTILDQLQRCQKSLNEFLEEKRSAFPRFYFIGDDDLLEILGQSTNPSVIQSHLKKLFAGINSVCFDEKSKHITAMKSLEGEVVPFKNKVPLSNNVETWLNDLALEMKKTLEQLLKECVTTGRSSQGAVDPSLFPSQILCLAEQIKFTEDVENAIKDHSLHQIETQLVNKLEQYTNIDTSSEDPGNTESGILELKLKALILDIIHNIDVVKQLNQIQVHTTEDWAWKKQLRFYMKSDHTCCVQMVDSEFQYTYEYQGNASKLVYTPLTDKCYLTLTQAMKMGLGGNPYGPAGTGKTESVKALGGLLGRQVLVFNCDEGIDVKSMGRIFVGLVKCGAWGCFDEFNRLEESVLSAVSMQIQTIQDALKNHRTVCELLGKEVEVNSNSGIFITMNPAGKGYGGRQKLPDNLKQLFRPVAMSHPDNELIAEVILYSEGFKDAKVLSRKLVAIFNLSRELLTPQQHYDWGLRALKTVLRGSGNLLRQLNKSGTTQNANESHIVVQALRLNTMSKFTFTDCTRFDALIKDVFPGIELKEVEYDELSAALKQVFEEANYEIIPNQIKKALELYEQLCQRMGVVIVGPSGAGKSTLWRMLRAALCKTGKVVKQYTMNPKAMPRYQLLGHIDMDTREWSDGVLTNSARQVVREPQDVSSWIICDGDIDPEWIESLNSVLDDNRLLTMPSGERIQFGPNVNFVFETHDLSCASPATISRMGMIFLSDEETDLNSLIKSWLRNQPAEYRNNLENWIGDYFEKALQWVLKQNDYVVETSLVGTVMNGLSHLHGCRDHDEFIINLIRGLGGNLNMKSRLEFTKEVFHWARESPPDFHKPMDTYYDSTRGRLATYVLKKPEDLTADDFSNGLTLPVIQTPDMQRGLDYFKPWLSSDTKQPFILVGPEGCGKGMLLRYAFSQLRSTQIATVHCSAQTTSRHLLQKLSQTCMVISTNTGRVYRPKDCERLVLYLKDINLPKLDKWGTSTLVAFLQQVLTYQGFYDENLEWVGLENIQIVASMSAGGRLGRHKLTTRFTSIVRLCSIDYPEREQLQTIYGAYLEPVLHKNLKNHSIWGSSSKIYLLAGSMVQVYEQVRAKFTVDDYSHYFFTPCILTQWVLGLFRYDLEGGSSNHPLDYVLEIVAYEARRLFRDKIVGAKELHLFDIILTSVFQGDWGSDILDNMSDSFYVTWGARHNSGARAAPGQPLPPHGKPLGKLNSTDLKDVIKKGLIHYGRDNQNLDILLFHEVLEYMSRIDRVLSFPGGSLLLAGRSGVGRRTITSLVSHMHGAVLFSPKISRGYELKQFKNDLKHVLQLAGIEAQQVVLLLEDYQFVHPTFLEMINSLLSSGEVPGLYTLEELEPLLLPLKDQASQDGFFGPVFNYFTYRIQQNLHIVLIMDSANSNFMINCESNPALHKKCQVLWMEGWSNSSMKKIPEMLFSETGGGEKYNDKKRKEEKKKNSVDPDFLKSFLLIHESCKAYGATPSRYMTFLHVYSAISSSKKKELLKRQSHLQAGVSKLNEAKALVDELNRKAGEQSVLLKTKQDEADAALQMITVSMQDASEQKTELERLKHRIAEEVVKIEERKNKIDDELKEVQPLVNEAKLAVGNIKPESLSEIRSLRMPPDVIRDILEGVLRLMGIFDTSWVSMKSFLAKRGVREDIATFDARNISKEIRESVEELLFKNKGSFDPKNAKRASTAAAPLAAWVKANIQYSHVLERIHPLETEQAGLESNLKKTEDRKRKLEELLNSVGQKVSELKEKFQSRTSEAAKLEAEVSKAQETIKAAEVLINQLDREHKRWNAQVVEITEELATLPKRAQLAAAFITYLSAAPESLRKTCLEEWTKSAGLEKFDLRRFLCTESEQLIWKSEGLPSDDLSIENALVILQIIGLKSWSRVCPFLIDPSSQATEWLKTHLKDSRLEVINQQDSNFITALELAVRFGKTLIIQEMDGVEPVLYPLLRRDLVAQGPRYVVQIGDKIIDYNEEFRLFLSTRNPNPFIPPDAASIVTEVNFTTTRSGLRGQLLALTIQHEKPDLEEQKTKLLQQEEDKKIQLAKLEESLLETLATSQGNILENKDLIESLNQTKASSALIQESLKESYKLQISLDQERDAYLPLAESASKMYFIISDLSKINNMYRFSLAAFLRLFQRALQNKQDSENTEQRIQSLISSLQHMVYEYICRCLFKADQLMFALHFVRGMHPELFQENEWDTFTGVVVGDMLRKADSQQKIRDQLPSWIDQERSWAVATLKIALPSLYQTLCFEDAALWRTYYNNSMCEQEFPSILAKKVSLFQQILVVQALRPDRLQSAMALFACKTLGLKEVSPLPLNLKRLYKETLEIEPILIIISPGADPSQELQELANAERSGECYHQVAMGQGQADLAIQMLKECARNGDWLCLKNLHLVVSWLPVLEKELNTLQPKDTFRLWLTAEVHPNFTPILLQSSLKITYESPPGLKKNLMRTYESWTPEQISKKDNTHRAHALFSLAWFHAACQERRNYIPQGWTKFYEFSLSDLRAGYNIIDRLFDGAKDVQWEFVHGLLENAIYGGRIDNYFDLRVLQSYLKQFFNSSVIDVFNQRNKKSIFPYSVSLPQSCSILDYRAVIEKIPEDDKPSFFGLPANIARSSQRMISSQVISQLRILGRSITAGSKFDREIWSNELSPVLNLWKKLNQNSNLIHQKVPPPNDRQGSPILSFIILEQFNAIRLVQSVHQSLAALSKVIRGTTLLSSEVQKLASALLNQKCPLAWQSKWEGPEDPLQYLRGLVARALAIQNWVDKAEKQALLSETLDLSELFHPDTFLNALRQETARAVGRSVDSLKFVASWKGRLQEAKLQIKISGLLLEGCSFDGNQLSENQLDSPSVSSVLPCFMGWIPQDACGPYSPDECISLPVYTSAERDRVVTNIDVPCGGNQDQWIQCGAALFLKNQ

SEQ ID NO: 140 - protein, 2214 aa, Homo sapiens
MVANFFKSLILPYIHKLCKGMFTKKLGNTNKNKEYRQQKKDQDFPTAGQTKSPKFSYTFKSTVKKIAKCSSTHNLSTEEDEASKEFSLSPTFSYRVAIANGLQKNAKVTNSDNEDLLQELSSIESSYSESLNELRSSTENQAQSTHTMPVRRNRKSSSSLAPSEGSSDGERTLHGLKLGALRKLRKWKKSQECVSSDSELSTMKKSWGIRSKSLDRTVRNPKTNALEPGFSSSGCISQTHDVMEMIFKELQGISQIETELSELRGHVNALKHSIDEISSSVEVVQSEIEQLRTGFVQSRRETRDIHDYIKHLGHMGSKASLRFLNVTEERFEYVESVVYQILIDKMGFSDAPNAIKIEFAQRIGHQRDCPNAKPRPILVYFETPQQRDSVLKKSYKLKGTGIGISTDILTHDIRERKEKGIPSSQTYESMAIKLSTPEPKIKKNNWQSPDDSDEDLESDLNRNSYAVLSKSELLTKGSTSKPSSKSHSARSKNKTANSSRISNKSDYDKISSQLPESDILEKQTTTHYADATPLWHSQSDFFTAKLSRSESDFSKLCQSYSEDFSENQFFTRTNGSSLLSSSDRELWQRKQEGTATLYDSPKDQHLNGGVQGIQGQTETENTETVDSGMSNGMVCASGDRSHYSDSQLSLHEDLSPWKEWNQGADLGLDSSTQEGFDYETNSLFDQQLDVYNKDLEYLGKCHSDLQDDSESYDLTQDDNSSPCPGLDNEPQGQWVGQYDSYQGANSNELYQNQNQLSMMYRSQSELQSDDSEDAPPKSWHSRLSIDLSDKTFSFPKFGSTLQRAKSALEVVWNKSTQSLSGYEDSGSSLMGRFRTLSQSTANESSTTLDSDVYTEPYYYKAEDEEDYTEPVADNETDYVEVMEQVLAKLENRTSITETDEQMQAYDHLSYETPYETPQDEGYDGPADDMVSEEGLEPLNETSAEMEIREDENQNIPEQPVEITKPKRIRPSFKEAALRAYKKQMAELEEKILAGDSSSVDEKARIVSGNDLDASKFSALQVCGGAGGGLYGIDSMPDLRRKKTLPIVRDVAMTLAARKSGLSLAMVIRTSLNNEELKMHVFKKTLQALIYPMSSTIPHNFEVWTATTPTYCYECEGLLWGIARQGMKCLECGVKCHEKCQDLLNADCLQRAAEKSSKHGAEDKTQTIITAMKERMKIREKNRPEVFEVIQEMFQISKEDFVQFTKAAKQSVLDGTSKWSAKITITVVSAQGLQAKDKTGSSDPYVTVQVGKNKRRTKTIFGNLNPVWDEKFYFECHNSTDRIKVRVWDEDDDIKSRVKQHFKKESDDFLGQTIVEVRTLSGEMDVWYNLEKRTDKSAVSGAIRLKINVEIKGEEKVAPYHIQYTCLHENLFHYLTEVKSNGGVKIPEVKGDEAWKVFFDDASQEIVDEFAMRYGIESIYQAMTHFSCLSSKYMCPGVPAVMSTLLANINAFYAHTTVSTNIQVSASDRFAATNFGREKFIKLLDQLHNSLRIDLSKYRENFPASNTERLQDLKSTVDLLTSITFFRMKVLELQSPPKASMVVKDCVRACLDSTYKYIFDNCHELYSQLTDPSKKQDIPREDQGPTTKNLDFWPQLITLMVTIIDEDKTAYTPVLNQFPQELNMGKISAEIMWTLFALDMKYALEEHENQRLCKSTDYMNLHFKVKWFYNEYVRELPAFKDAVPEYSLWFEPFVMQWLDENEDVSMEFLHGALGRDKKDGFQQTSEHALFSCSVVDVFAQLNQSFEIIKKLECPNPEALSHLMRRFAKTINKVLLQYAAIVSSDFSSHCDKENVPCILMNNIQQLRVQLEKMFESMGGKELDSEASTILKELQVKLSGVLDELSVTYGESFQVIIEECIKQMSFELNQMRANGNTTSNKNSAAMDAEIVLRSLMDFLDKTLSLSAKICEKTVLKRVLKELWKLVLNKIEKQIVLPPLTDQTGPQMIFIAAKDLGQLSKLKEHMIREDARGLTPRQCAIMEVVLATIKQYFHAGGNGLKKNFLEKSPDLQSLRYALSLYTQTTDALIKKFIDTQTSQSRSSKDAVGQISVHVDITATPGTGDHKVTVKVIAINDLNWQTTAMFRPFVEVCILGPNLGDKKRKQGTKTKSNTWSPKYNETFQFILGKENRPGAYELHLSVKDYCFAREDRIIGMTVIQLQNIAEKGSYGAWYPLLKNISMDETGLTILRILSQRTSDDVAKEFVRLKSETRSTEESA

SEQ ID NO: 141 - protein, 2839 aa, Homo sapiens
MPITQDNAVLHLPLLYQWLQNSLQEGGDGPEQRLCQAAIQKLQEYIQLNFAVDESTVPPDHSPPEMEICTVYLTKELGDTETVGLSFGNIPVFGDYGEKRRGGKKRKTHQGPVLDVGCIWVTELRKNSPAGKSGKVRLRDEILSLNGQLMVGVDVSGASYLAEQCWNGGFIYLIMLRRFKHKAHSTYNGNSSNSSEPGETPTLELGDRTAKKGKRTRKFGVISRPPANKAPEESKGSAGCEVSSDPSTELENGPDPELGNGHVFQLENGPDSLKEVAGPHLERSEVDRGTEHRIPKTDAPLTTSNDKRRFSKGGKTDFQSSDCLAREEVGRIWKMELLKESDGLGIQVSGGRGSKRSPHAIVVTQVKEGGAAHRDGRLSLGDELLVINGHLLVGLSHEEAVAILRSATGMVQLVVASKENSAEDLLRLTSKSLPDLTSSVEDVSSWTDNEDQEADGEEDEGTSSSVQRAMPGTDEPQDVCGAEESKGNLESPKQGSNKIKLKSRLSGGVHRLESVEEYNELMVRNGDPRIRMLEVSRDGRKHSLPQLLDSSSASQEYHIVKKSTRSLSTTQVESPWRLIRPSVISIIGLYKEKGKGLGFSIAGGRDCIRGQMGIFVKTIFPNGSAAEDGRLKEGDEILDVNGIPIKGLTFQEAIHTFKQIRSGLFVLTVRTKLVSPSLTPCSTPTHMSRSASPNFNTSGGASAGGSDEGSSSSLGRKTPGPKDRIVMEVTLNKEPRVGLGIGACCLALENSPPGIYIHSLAPGSVAKMESNLSRGDQILEVNSVNVRHAALSKVHAILSKCPPGPVRLVIGRHPNPKVSEQEMDEVIARSTYQESKEANSSPGLGTPLKSPSLAKKDSLISESELSQYFAHDVPGPLSDFMVAGSEDEDHPGSGCSTSEEGSLPPSTSTHKEPGKPRANSLVTLGSHRASGLFHKQVTVARQASLPGSPQALRNPLLRQRKVGCYDANDASDEEEFDREGDCISLPGALPGPIRPLSEDDPRRVSISSSKGMDVHNQEERPRKTLVSKAISAPLLGSSVDLEESIPEGMVDAASYAANLTDSAEAPKGSPGSWWKKELSGSSSAPKLEYTVRTDTQSPTNTGSPSSPQQKSEGLGSRHRPVARVSPHCKRSEAEAKPSGSQTVNLTGRANDPCDLDSRVQATSVKVTVAGFQPGGAVEKESLGKLTTGDACVSTSCELASALSHLDASHLTENLPKAASELGQQPMTELDSSSDLISSPGKKGAAHPDPSKTSVDTGQVSRPENPSQPASPRVTKCKARSPVRLPHEGSPSPGEKAAAPPDYSKTRSASETSTPHNTRRVAALRGAGPGAEGMTPAGAVLPGDPLTSQEQRQGAPGNHSKALEMTGIHAPESSQEPSLLEGADSVSSRAPQASLSMLPSTDNTKEACGHVSGHCCPGGSRESPVTDIDSFIKELDASAARSPSSQTGDSGSQEGSAQGHPPAGAGGGSSCRAEPVPGGQTSSPRRAWAAGAPAYPQWASQPSVLDSINPDKHFTVNKNFLSNYSRNFSSFHEDSTSLSGLGDSTEPSLSSMYGDAEDSSSDPESLTEAPRASARDGWSPPRSRVSLHKEDPSESEEEQIEICSTRGCPNPPSSPAHLPTQAAICPASAKVLSLKYSTPRESVASPREKAACLPGSYTSGPDSSQPSSLLEMSSQEHETHADISTSQNHRPSCAEETTEVTSASSAMENSPLSKVARHFHSPPIILSSPNMVNGLEHDLLDDETLNQYETSINAAASLSSFSVDVPKNGESVLENLHISESQDLDDLLQKPKMIARRPIMAWFKEINKHNQGTHLRSKTEKEQPLMPARSPDSKIQMVSSSQKKGVTVPHSPPQPKTNLENKDLSKKSPAEMLLTNGQKAKCGPKLKRLSLKGKAKVNSEAPAANAVKAGGTDHRKPLISPQTSHKTLSKAVSQRLHVADHEDPDRNTTAAPRSPQCVLESKPPLATSGPLKPSVSDTSIRTFVSPLTSPKPVPEQGMWSRFHMAVLSEPDRGCPTTPKSPKCRAEGRAPRADSGPVSPAASRNGMSVAGNRQSEPRLASHVAADTAQPRPTGEKGGNIMASDRLERTNQLKIVEISAEAVSETVCGNKPAESDRRGGCLAQGNCQEKSEIRLYRQVAESSTSHPSSLPSHASQAEQEMSRSFSMAKLASSSSSLQTAIRKAEYSQGKSSLMSDSRGVPRNSIPGGPSGEDHLYFTPRPATRTYSMPAQFSSHFGREGHPPHSLGRSRDSQVPVTSSVVPEAKASRGGLPSLANGQGIYSVKPLLDTSRNLPATDEGDIISVQETSCLVTDKIKVTRRHYCYEQNWPHESTSFFSVKQRIKSFENLANADRPVAKSGASPFLSVSSKPPIGRRSSGSIVSGSLGHPGDAAARLLRRSLSSCSENQSEAGTLLPQMAKSPSIMTLTISRQNPPETSSKGSDSELKKSLGPLGIPTPTMTLASPVKRNKSSVRHTQPSPVSRSKLQELRALSMPDLDKLCSEDYSAGPSAVLFKTELEITPRRSPGPPAGGVSCPEKGGNRACPGGSGPKTSAAETPSSASDTGEAAQDLPFRRSWSVNLDQLLVSAGDQQRLQSVLSSVGSKSTILTLIQEAKAQSENEEDVCFIVLNRKEGSGLGFSVAGGTDVEPKSITVHRVFSQGAASQEGTMNRGDFLLSVNGASLAGLAHGNVLKVLHQAQLHKDALVVIKKGMDQPRPSARQEPPTANGKGLLSRKTIPLEPGIGRSVAVHDALCVEVLKTSAGLGLSLDGGKSSVTGDGPLVIKRVYKGGAAEQAGIIEAGDEILAINGKPLVGLMHFDAWNIMKSVPEGPVQLLIRKHRNSS

SEQ ID NO: 142 - protein, 4462 aa, Homo sapiens
MTMAPDVRLEYLEEVASIVLKFKPDKWSKLIGAEENVALFTEFFEKPDVQVLVLTLNAAGMIIPCLGFPQSLKSKGVYFIKTKSENINKDNYRARLLYGDISPTPVDQLIAVVEEVLSSLLNQSENMAGWPQVVSEDIVKQVHRLKNEMFVMSGKIKGKTLLPIPEHLGSLDGTLESMERIPSSLDNLLLHAIETTIIDWSHQIRDVLSKDSAQALLDGLHPLPQVEFEFWDTRLLNLKCIHEQLNRPKVNKIVEILEKAKSCYWPALQNVYTNVTEGLKEANDIVLYLKPLRILLEEMEQADFTMLPTFIAKVLDTICFIWATSEYYNTPARIIVILQEFCNQIIEMTRTFLSPEEVLKGLQGEIEEVLSGISLAVNVLKELYQTYDFCCVNMKLFFKDKEPVPWEFPSSLAFSRINSFFQRIQTIEELYKTAIEFLKLEKIELGGVRGNLLGSLVTRIYDEVFELVKVFADCKYDPLDPGDSNFDRDYADFEIKIQDLDRRLATIFCQGFDDCSCIKSSAKLLYMCGGLMERPLILAEVAPRYSVMLELFDAELDNAKILYDAQMAASEEGNIPLIHKNMPPVAGQLKWSLELQERLEVSMKHLKHVEHPVMSGAEAKLTYQKYDEMMELLRCHREKIYQQWVAGVDQDCHFNLGQPLILRDAASNLIHVNFSKALVAVLREVKYLNFQQQKEIPDSAESLFSENETFRKFVGNLELIVGWYNEIKTIVKAVEFLLIKSELEAIDVKLLSAETTLFWNGEGVFQYIQEVREILHNLQNRMQKAKQNIEGISQAMKDWSANPLFERKDNKKEALLDLDGRIANLNKRYAAVRDAGVKIQAMVAENAELFRADTLSLPWKDYVIYIDDMVLDEFDQFIRKSLSFLMDNMVIDESIAPLFEIRMELDEDGLTFNPTLEVGSDRGFLALIEGLVNDIYNVARLIPRLAKDRMNYKMDLEDNTDLIEMREEVSSLVINAMKEAEEYQDSFERYSYLWTDNLQEFMKNFLIYGCAVTAEDLDTWTDDTIPKTPPTLAQFQEQIDSYEKLYEEVSKCENTKVFHGWLQCDCRPFKQALLSTIRRWGFMFKRHLSNHVTNSLADLEAFMKVARMGLTKPLKEGDYDGLVEVMGHLMKVKERQAATDNMFEPLKQTIELLKTYGEEMPEEIHLKLQELPEHWANTKKLAIQVKLTVAPLQANEVSILRRKCQQFELKQHEFRERFRREAPFSFSDPNPYKSLNKQQKSISAMEGIMEALSKSGGLFEVPVPDYKQLKACHREVRLLKELWDMVVVVNTSIEDWKTTKWKDINVEQMDIDCKKFAKDMRSLDKEMKTWDAFVGLDNTVKNVITSLRAVSELQNPAIRERHWQQLMQATQVKFKMSEETTLADLLQLNLHSYEDEVRNIVDKAVKESGMEKVLKALDSTWSMMEFQHEPHPRTGTMMLKSSEVLVETLEDNQVQLQNLMMSKYLAHFLKEVTSWQQKLSTADSVISIWFEVQRTWSHLESIFIGSEDIRTQLPGDSQRFDDINQEFKALMEDAVKTPNVVEATSKPGLYNKLEALKKSLAICEKALAEYLETKRLAFPRFYFVSSADLLDILSNGNDPVEVSRHLSKLFDSLCKLKFRLDASDKPLKVGLGMYSKEDEYMVFDQECDLSGQVEVWLNRVLDRMCSTLRHEIPEAVVTYEEKPREQWILDYPAQVALTCTQIWWTTEVGLAFARLEEGYENAIRDYNKKQISQLNVLITLLMGNLNAGDRMKIMTICTIDVHARDVVAKMIVAKVESSQAFTWQAQLRHRWDEEKRHCFANICDAQIQYSYEYLGNTPRLVITPLTDRCYITLTQSLHLIMGGAPAGPAGTGKTETTKDLGRALGTMVYVFNCSEQMDYKSCGNIYKGLAQTGAWGCFDEFNRISVEVLSVIAVQVKCVQDAIRAKKKAFNFLGEIIGLIPTVGIFITMNPGYAGRAELPENLKALFRPCAMVVPDFELICEIMLMAEGFLEARLLARKFITLYTLCKELLSKQDHYDWGLRAIKSVLVVAGSLKRGDPSRAEDQVLMRALRDFNIPKIVTDDLPVFMGLIGDLFPALDVPRKRDLNFEKIIKQSIVELKLQAEDSFVLKVVQLEELLQVRHSVFIVGNAGSGKSQVLKSLNKTYQNLKRKPVAVDLDPKAVTCDELFGIINPVTREWKDGLFSTIMRDLANITHDGPKWIILDGDIDPMWIESLNTVMDDNKVLTLASNERIPLNRTMRLVFEISHLRTATPATVSRAGILYINPADLGWNPVVSSWIERRKVQSEKANLMILFDKYLPTCLDKLRFGFKKITPVPEITVIQTILYLLECLLTEKTVPPDSPRELYELYFVFTCFWAFGGAMFQDQLVDYRVEFSKWWINEFKTIKFPSQGTIFDYYIDPDTKKFLPWTDKVPSFELDPDVPLQASLVHTTETIRIRYFMDLLMEKSWPVMLVGNAGTGKSVLMGDKLESLNTDNYLVQAVPFNFYTTSAMLQGVLEKPLEKKSGRNYGPPGTKKLVYFIDDMNMPEVDKYGTVAPHTLIRQHMDHRHWYDRHKLTLKDIHNCQYVACMNPTSGSFTIDSRLQRHFCVFAVSFPGQEALTTIYNTILTQHLAFRSVSMAIQRISSQLVAAALALHQKITATFLPTAIKFHYVFNLRDLSNIFQGLLFSTAEVLKTPLDLVRLWLHETERVYGDKMVDEKDQETLHRVTMASTKKFFDDLGDELLFAKPNIFCHFAQGIGDPKYVPVTDMAPLNKLLVDVLDSYNEVNAVMNLVLFEDAVAHICRINRILESPRGNALLVGVGGSGKQSLSRLAAYISGLDVFQITLKKGYGIPDLKIDLAAQYIKAAVKNVPSVFLMTDSQVAEEQFLVLINDLLASGEIPGLFMEDEVENIISSMRPQVKSLGMNDTRETCWKFFIEKVRRQLKVILCFSPVGSVLRVRARKFPAVVNCTAIDWFHEWPEDALVSVSARFLEETEGIPWEVKASISFFMSYVHTTVNEMSRVYLATERRYNYTTPKTFLEQIKLYQNLLAKKRTELVAKIERLENGLMKLQSTASQVDDLKAKLAIQEAELKQKNESADQLIQVVGIEAEKVSKEKAIADQEEVKVEVINKNVTEKQKACETDLAKAEPALLAAQEALDTLNKNNLTELKSFGSPPDAVVNVTAAVMILTAPGGKIPKDKSWKAAKIMMGKVDTFLDSLKKFDKEHIPEACLKAFKPYQGNPTFDPEFIRSKSTAAAGLCSWCINIVRFYEVYCDVAPKRQALEEANAELAEAQEKLSRIKNKIAELNANLSNLTSAFEKATAEKIKCQQEADATNRVILLANRLVGGLASENIRWAESVENFRSQGVTLCGDVLLISAFVSYVGYFTKKYRNELMEKFWIPYIHNLKVPIPITNGLDPLSLLTDDADVATWNNQGLPSDRMSTENATILGNTERWPLIVDAQLQGIKWIKNKYRSELKAIRLGQKSYLDVIEQAISEGDTLLIENIGETVDPVLDPLLGRNTIKKGKYIKIGDKEVEYHPKFRLILHTKYFNPHYKPEMQAQCTLINFLVTRDGLEDQLLAAVVAKERPDLEQLKANLTKSQNEFKIVLKELEDSLLARLSAASGNFLGDTALVENLETTKHTASEIEEKVVEAKITEVKINEARENYRPAAERASLLYFILNDLNKINPVYQFSLKAFNVVFEKAIQRTTPANEVKQRVINLTDEITYSVYMYTARGLFERDKLIFLAQVTFQVLSMKKELNPVELDFLLRFPFKAGVVSPVDFLQHQGWGGIKALSEMDEFKNLDSDIEGSAKRWKKLVESEAPEKEIFPKEWKNKTALQKLCMVRCLRPDRMTYAIKNFVEEKMGSKFVEGRSVEFSKSYEESSPSTSIFFILSPGVDPLKDVEALGKKLGFTIDNGKLHNVSLGQGQEVVAENALDVAAEKGHWVILQNIHLVARWLGTLDKKLEHYSTGSHEDYRVFISAEPAPSPETHIIPQGILENAIKITNEPPTGMHANLHKALDLFTQDTLEMCTKEMEFKCMLFALCYFHAVVAERRKFGAQGWNRSYPFNNGDLTISINVLYNYLEANPKVPWDDLRYLFGEIMYGGHITDDWDRRLCRTYLAEYIRTEMLEGDVLLAPGFQIPPNLDYKGYHEYIDENLPPESPYLYGLHPNAEIGFLTVTSEKLFRTVLEMQPKETDSGAGTGVSREEKVKAVLDDILEKIPETFNMAEIMAKAAEKTPYVVVAFQECERMNILTNEMRRSLKELNLGLKGELTITTDVEDLSTALFYDTVPDTWVARAYPSMMGLAAWYADLLLRIRELEAWTTDFALPTTVWLAGFFNPQSFLTAIMQSMARKNEWPLDKMCLSVEVTKKNREDMTAPPREGSYVYGLFMEGARWDTQTGVIAEARLKELTPAMPVIFIKAIPVDRMETKNIYECPVYKTRIRGPTYVWTFNLKTKEKAAKWILAAVALLLQV

SEQ ID NO: 143 - protein, 2161 aa, Homo sapiens
MTHSPATSEDEERHSASECPEGGSESDSSPDGPGRGPRGTRGQGSGAPGSLASVRGLQGRSMSVPDDAHFSMMVFRIGIPDLHQTKCLRFNPDATIWTAKQQVLCALSESLQDVLNYGLFQPATSGRDANFLEEERLLREYPQSFEKGVPYLEFRYKTRVYKQTNLDEKQLAKLHTKTGLKKFLEYVQLGTSDKVARLLDKGLDPNYHDSDSGETPLTLAAQTEGSVEVIRTLCLGGAHIDFRARDGMTALHKAACARHCLALTALLDLGGSPNYKDRRGLTPLFHTAMVGGDPRCCELLLFNRAQLGIADENGWQEIHQACQRGHSQHLEHLLFYGAEPGAQNASGNTALHICALYNKETCARILLYRGADKDVKNNNGQTPFQVAVIAGNFELGELIRNHREQDVVPFQESPKYAARRRGPPGTGLTVPPALLRANSDTSMALPDWMVFSAPGAASSGAPGPTSGSQGQSQPSAPTTKLSSGTLRSASSPRGARARSPSRGRHPEDAKRQPRGRPSSSGTPREGPAGGTGGSGGPGGSLGSRGRRRKLYSAVPGRSFMAVKSYQAQAEGEISLSKGEKIKVLSIGEGGFWEGQVKGRVGWFPSDCLEEVANRSQESKQESRSDKAKRLFRHYTVGSYDSFDAPSLMDGIGPGSDYIIKEKTVLLQKKDSEGFGFVLRGAKAQTPIEEFTPTPAFPALQYLESVDEGGVAWRAGLRMGDFLIEVNGQNVVKVGHRQVVNMIRQGGNTLMVKVVMVTRHPDMDEAVHKKAPQQAKRLPPPTISLRSKSMTSELEEMEYEQQPAPVPSMEKKRTVYQMALNKLDEILAAAQQTISASESPGPGGLASLGKHRPKGFFATESSFDPHHRAQPSYERPSFLPPGPGLMLRQKSIGAAEDDRPYLAPPAMKFSRSLSVPGSEDIPPPPTTSPPEPPYSTPPVPSSSGRLTPSPRGGPFNPGSGGPLPASSPASFDGPSPPDTRVGSREKSLYHSGPLPPAHHHPPHHHHHHAPPPQPHHHHAHPPHPPEMETGGSPDDPPPRLALGPQPSLRGWRGGGPSPTPGAPSPSHHGSAGGGGGSSQGPALRYFQLPPRAASAAMYVPARSGRGRKGPLVKQTKVEGEPQKGGGLPPAPSPTSPASPQPPPAVAAPSEKNSIPIPTIIIKAPSTSSSGRSSQGSSTEAEPPTQPEPTGGGGGGGSSPSPAPAMSPVPPSPSPVPTPASPSGPATLDFTSQFGAALVGAARREGGWQNEARRRSTLFLSTDAGDEDGGDGGLGTGAAPGPRLRHSKSIDEGMFSAEPYLRLESAGSGAGYGGYGAGSRAYGGGGGSSAFTSFLPPRPLVHPLTGKALDPASPLGLALAARERALKESSEGGGAPQPPPRPPSPRYEAPPPTPHHHSPHAHHEPVLRLWGASPPDPARRELGYRAGLGSQEKSLPASPPAARRSLLHRLPPTAPGVGPLLLQLGTEPPAPHPGVSKPWRSAAPEEPERLPLHVRFLENCQPRAPVTSGRGPPSEDGPGVPPPSPRRSVPPSPTSPRASEENGLPLLVLPPPAPSVDVEDGEFLFVEPLPPPLEFSNSFEKPESPLTPGPPHPLPDTPAPATPLPPVPPPAVAAAPPTLDSTASSLTSYDSEVATLTQGASAAPGDPHPPGPPAPAAPAPAAPQPGPDPPPGTDSGIEEVDSRSSSDHPLETISSASTLSSLSAEGGGSAGGGGGAGAGVASGPELLDTYVAYLDGQAFGGSSTPGPPYPPQLMTPSKLRGRALGASGGLRPGPSGGLRDPVTPTSPTVSVTGAGTDGLLALRACSGPPTAGVAGGPVAVEPEVPPVPLPTASSLPRKLLPWEEGPGPPPPPLPGPLAQPQASALATVKASIISELSSKLQQFGGSSAAGGALPWARGGSGGGGDSHHGGASYVPERTSSLQRQRLSDDSQSSLLSKPVSSLFQNWPKPPLPPLPTGTGVSPTAAAAPGATSPSASSSSTSTRHLQGVEFEMRPPLLRRAPSPSLLPASEHKVSPAPRPSSLPILPSGPLYPGLFDIRGSPTGGAGGSADPFAPVFVPPHPGISGGLGGALSGASRSLSPTRLLSLPPDKPFGAKPLGFWTKFDVADWLEWLGLAEHRAQFLDHEIDGSHLPALTKEDYVDLGVTRVGHRMNIDRALKFFLER

SEQ ID NO: 144 - protein, 4857 aa, Homo sapiens
MVTGGGAAPPGTVTEPLPSVIVLSAGRKMAAAAAAASGPGCSSAAGAGAAGVSEWLVLRDGCMHCDADGLHSLSYHPALNAILAVTSRGTIKVIDGTSGATLQASALSAKPGGQVKCQYISAVDKVIFVDDYAVGCRKDLNGILLLDTALQTPVSKQDDVVQLELPVTEAQQLLSACLEKVDISSTEGYDLFITQLKDGLKNTSHETAANHKVAKWATVTFHLPHHVLKSIASAIVNELKKINQNVAALPVASSVMDRLSYLLPSARPELGVGPGRSVDRSLMYSEANRRETFTSWPHVGYRWAQPDPMAQAGFYHQPASSGDDRAMCFTCSVCLVCWEPTDEPWSEHERHSPNCPFVKGEHTQNVPLSVTLATSPAQFPCTDGTDRISCFGSGSCPHFLAAATKRGKICIWDVSKLMKVHLKFEINAYDPAIVQQLILSGDPSSGVDSRRPTLAWLEDSSSCSDIPKLEGDSDDLLEDSDSEEHSRSDSVTGHTSQKEAMEVSLDITALSILQQPEKLQWEIVANVLEDTVKDLEELGANPCLTNSKSEKTKEKHQEQHNIPFPCLLAGGLLTYKSPATSPISSNSHRSLDGLSRTQGESISEQGSTDNESCTNSELNSPLVRRTLPVLLLYSIKESDEKAGKIFSQMNNIMSKSLHDDGFTVPQIIEMELDSQEQLLLQDPPVTYIQQFADAAANLTSPDSEKWNSVFPKPGTLVQCLRLPKFAEEENLCIDSITPCADGIHLLVGLRTCPVESLSAINQVEALNNLNKLNSALCNRRKGELESNLAVVNGANISVIQHESPADVQTPLIIQPEQRNVSGGYLVLYKMNYATRIVTLEEEPIKIQHIKDPQDTITSLILLPPDILDNREDDCEEPIEDMQLTSKNGFEREKTSDISTLGHLVITTQGGYVKILDLSNFEILAKVEPPKKEGTEEQDTFVSVIYCSGTDRLCACTKGGELHFLQIGGTCDDIDEADILVDGSLSKGIEPSSEGSKPLSNPSSPGISGVDLLVDQPFTLEILTSLVELTRFETLTPRFSATVPPCWVEVQQEQQQRRHPQHLHQQHHGDAAQHTRTWKLQTDSNSWDEHVFELVLPKACMVGHVDFKFVLNSNITNIPQIQVTLLKNKAPGLGKVNALNIEVEQNGKPSLVDLNEEMQHMDVEESQCLRLCPFLEDHKEDILCGPVWLASGLDLSGHAGMLTLTSPKLVKGMAGGKYRSFLIHVKAVNERGTEEICNGGMRPVVRLPSLKHQSNKGYSLASLLAKVAAGKEKSSNVKNENTSGTRKSENLRGCDLLQEVSVTIRRFKKTSISKERVQRCAMLQFSEFHEKLLNTLCRKTDDGQITEHAQSLVLDTLCWLAGVHSNGPGSSKEGNENLLSKTRKFLSDIVRVCFFEAGRSIAHKCARFLALCISNGKCDPCQPAFGPVLLKALLDNMSFLPAATTGGSVYWYFVLLNYVKDEDLAGCSTACASLLTAVSRQLQDRLTPMEALLQTRYGLYSSPFDPVLFDLEMSGSSCKNVYNSSIGVQSDEIDLSDVLSGNGKVSSCTAAEGSFTSLTGLLEVEPLHFTCVSTSDGTRIERDDAMSSFGVTPAVGGLSSGTVGEASTALSSAAQVALQSLSHAMASAEQQLQVLQEKQQQLLKLQQQKAKLEAKLHQTTAAAAAAASAVGPVHNSVPSNPVAAPGFFIHPSDVIPPTPKTTPLFMTPPLTPPNEAVSVVINAELAQLFPGSVIDPPAVNLAAHNKNSNKSRMNPLGSGLALAISHASHFLQPPPHQSIIIERMHSGARRFVTLDFGRPILLTDVLIPTCGDLASLSIDIWTLGEEVDGRRLVVATDISTHSLILHDLIPPPVCRFMKITVIGRYGSTNARAKIPLGFYYGHTYILPWESELKLMHDPLKGEGESANQPEIDQHLAMMVALQEDIQCRYNLACHRLETLLQSIDLPPLNSANNAQYFLRKPDKAVEEDSRVFSAYQDCIQLQLQLNLAHNAVQRLKVALGASRKMLSETSNPEDLIQTSSTEQLRTIIRYLLDTLLSLLHASNGHSVPAVLQSTFHAQACEELFKHLCISGTPKIRLHTGLLLVQLCGGERWWGQFLSNVLQELYNSEQLLIFPQDRVFMLLSCIGQRSLSNSGVLESLLNLLDNLLSPLQPQLPMHRRTEGVLDIPMISWVVMLVSRLLDYVATVEDEAAAAKKPLNGNQWSFINNNLHTQSLNRSSKGSSSLDRLYSRKIRKQLVHHKQQLNLLKAKQKALVEQMEKEKIQSNKGSSYKLLVEQAKLKQATSKHFKDLIRLRRTAEWSRSNLDTEVTTAKESPEIEPLPFTLAHERCISVVQKLVLFLLSMDFTCHADLLLFVCKVLARIANATRPTIHLCEIVNEPQLERLLLLLVGTDFNRGDISWGGAWAQYSLTCMLQDILAGELLAPVAAEAMEEGTVGDDVGATAGDSDDSLQQSSVQLLETIDEPLTHDITGAPPLSSLEKDKEIDLELLQDLMEVDIDPLDIDLEKDPLAAKVFKPISSTWYDYWGADYGTYNYNPYIGGLGIPVAKPPANTEKNGSQTVSVSVSQALDARLEVGLEQQAELMLKMMSTLEADSILQALTNTSPTLSQSPTGTDDSLLGGLQAANQTSQLIIQLSSVPMLNVCFNKLFSMLQVHHVQLESLLQLWLTLSLNSSSTGNKENGADIFLYNANRIPVISLNQASITSFLTVLAWYPNTLLRTWCLVLHSLTLMTNMQLNSGSSSAIGTQESTAHLLVSDPNLIHVLVKFLSGTSPHGTNQHSPQVGPTATQAMQEFLTRLQVHLSSTCPQIFSEFLLKLIHILSTERGAFQTGQGPLDAQVKLLEFTLEQNFEVVSVSTISAVIESVTFLVHHYITCSDKVMSRSGSDSSVGARACFGGLFANLIRPGDAKAVCGEMTRDQLMFDLLKLVNILVQLPLSGNREYSARVSVTTNTTDSVSDEEKVSGGKDGNGSSTSVQGSPAYVADLVLANQQIMSQILSALGLCNSSAMAMIIGASGLHLTKHENFHGGLDAISVGDGLFTILTTLSKKASTVHMMLQPILTYMACGYMGRQGSLATCQLSEPLLWFILRVLDTSDALKAFHDMGGVQLICNNMVTSTRAIVNTARSMVSTIMKFLDSGPNKAVDSTLKTRILASEPDNAEGIHNFAPLGTITSSSPTAQPAEVLLQATPPHRRARSAAWSYIFLPEEAWCDLTIHLPAAVLLKEIHIQPHLASLATCPSSVSVEVSADGVNMLPLSTPVVTSGLTYIKIQLVKAEVASAVCLRLHRPRDASTLGLSQIKLLGLTAFGTTSSATVNNPFLPSEDQVSKTSIGWLRLLHHCLTHISDLEGMMASAAAPTANLLQTCAALLMSPYCGMHSPNIEVVLVKIGLQSTRIGLKLIDILLRNCAASGSDPTDLNSPLLFGRLNGLSSDSTIDILYQLGTTQDPGTKDRIQALLKWVSDSARVAAMKRSGRMNYMCPNSSTVEYGLLMPSPSHLHCVAAILWHSYELLVEYDLPALLDQELFELLFNWSMSLPCNMVLKKAVDSLLCSMCHVHPNYFSLLMGWMGITPPPVQCHHRLSMTDDSKKQDLSSSLTDDSKNAQAPLALTESHLATLASSSQSPEAIKQLLDSGLPSLLVRSLASFCFSHISSSESIAQSIDISQDKLRRHHVPQQCNKMPITADLVAPILRFLTEVGNSHIMKDWLGGSEVNPLWTALLFLLCHSGSTSGSHNLGAQQTSARSASLSSAATTGLTTQQRTAIENATVAFFLQCISCHPNNQKLMAQVLCELFQTSPQRGNLPTSGNISGFIRRLFLQLMLEDEKVTMFLQSPCPLYKGRINATSHVIQHPMYGAGHKFRTLHLPVSTTLSDVLDRVSDTPSITAKLISEQKDDKEKKNHEEKEKVKAENGFQDNYSVVVASGLKSQSKRAVSATPPRPPSRRGRTIPDKIGSTSGAEAANKIITVPVFHLFHKLLAGQPLPAEMTLAQLLTLLYDRKLPQGYRSIDLTVKLGSRVITDPSLSKTDSYKRLHPEKDHGDLLASCPEDEALTPGDECMDGILDESLLETCPIQSPLQVFAGMGGLALIAERLPMLYPEVIQQVSAPVVTSTTQEKPKDSDQFEWVTIEQSGELVYEAPETVAAEPPPIKSAVQTMSPIPAHSLAAFGLFLRLPGYAEVLLKERKHAQCLLRLVLGVTDDGEGSHILQSPSANVLPTLPFHVLRSLFSTTPLTTDDGVLLRRMALEIGALHLILVCLSALSHHSPRVPNSSVNQTEPQVSSSHNPTSTEEQQLYWAKGTGFGTGSTASGWDVEQALTKQRLEEEHVTCLLQVLASYINPVSSAVNGEAQSSHETRGQNSNALPSVLLELLSQSCLIPAMSSYLRNDSVLDMARHVPLYRALLELLRAIASCAAMVPLLLPLSTENGEEEEEQSECQTSVGTLLAKMKTCVDTYTNRLRSKRENVKTGVKPDASDQEPEGLTLLVPDIQKTAEIVYAATTSLRQANQEKKLGEYSKKAAMKPKPLSVLKSLEEKYVAVMKKLQFDTFEMVSEDEDGKLGFKVNYHYMSQVKNANDANSAARARRLAQEAVTLSTSLPLSSSSSVFVRCDEERLDIMKVLITGPADTPYANGCFEFDVYFPQDYPSSPPLVNLETTGGHSVRFNPNLYNDGKVCLSILNTWHGRPEEKWNPQTSSFLQVLVSVQSLILVAEPYFNEPGYERSRGTPSGTQSSREYDGNIRQATVKWAMLEQIRNPSPCFKEVIHKHFYLKRVEIMAQCEEWIADIQQYSSDKRVGRTMSHHAAALKRHTAQLREELLKLPCPEGLDPDTDDAPEVCRATTGAEETLMHDQVKPSSSKELPSDFQL

SEQ ID NO: 145 - protein, 4700 aa, Homo sapiens
MANVQVAVRVRPLSKRETKEGGRIIVEVDGKVAKIRNLKVDNRPDGFGDSREKVMAFGFDYCYWSVNPEDPQYASQDVVFQDLGMEVLSGVAKGYNICLFAYGQTGSGKTYTMLGTPASVGLTPRICEGLFVREKDCASLPSSCRIKVSFLEIYNERVRDLLKQSGQKKSYTLRVREHPEMGPYVQGLSQHVVTNYKQVIQLLEEGIANRITAATHVHEASSRSHAIFTIHYTQAILENNLPSEMASKINLVDLAGSERADPSYCKDRIAEGANINKSLVTLGIVISTLAQNSQVFSSCQSLNSSVSNGGDSGILSSPSGTSSGGAPSRRQSYIPYRDSVLTWLLKDSLGGNSKTIMVATVSPAHTSYSETMSTLRYASSAKNIINKPRVNEDANLKLIRELREEIERLKALLLSFELRNFSSLSDENLKELVLQNELKIDQLTKDWTQKWNDWQALMEHYSVDINRRRAGVVIDSSLPHLMALEDDVLSTGVVLYHLKEGTTKIGRIDSDQEQDIVLQGQWIERDHCTITSACGVVVLRPARGARCTVNGREVTASCRLTQGAVITLGKAQKFRFNHPAEAAVLRQRRQVGEAAAGRGSLEWLDLDGDLAASRLGLSPLLWKERRALEEQCDEDHQTPRDGETSHRAQIQQQQSYVEDLRHQILAEEIRAAKELEFDQAWISQQIKENQQCLLREETWLASLQQQQQEDQVAEKELEASVALDAWLQTDPEIQPSPFVQSQKRVVHLQLLRRHTLRAAERNVRRKKVSFQLERIIKKQRLLEAQKRLEKLTTLCWLQDDSTQEPPYQVLSPDATVPRPPCRSKLTSCSSLSPQRLCSKHMPQLHSIFLSWDPSTTLPPRPDPTHQTSEKTSSEEHLPQAASYPARTGCLRKNGLHSSGHGQPCTARAALARKGASAPDACLTMSPNSVGIQEMEMGVKQPHQMVSQGLASLRKSANKLKPRHEPKIFTSTTQTRGAKGLADPSHTQAGWRKEGNLGTHKAAKGASCNSLYPHGPRQTAGHGKAVKTFWTEYKPPSPSRASKRHQRVLATRVRNITKKSSHLPLGSPLKRQQNTRDPDTMVPLTDFSPVMDHSREKDNDLSDTDSNYSLDSLSCVYAKALIEPLKPEERKWDFPEPENSESDDSQLSEDSLAEKRYQSPKNRLGGNRPTNNRGQPRTRTRASVRGFTAASDSDLLAQTHRSFSLDSLIDAEEELGEDQQEEPFPGSADEIPTETFWHLEDSSLPVMDQEAICRLGPINYRTAARLDAVLPMSSSFYLDPQFQPHCELQPHCELQPHCELQPHCEQAESQVEPSYSEQADSLQGMQLSRESPLMSMDSWFSCDSKINPSSPPGIVGSLCPSPDMQEFHSCKGERPGYWPNTEELKPSDAETVLPYSSKLHQGSTELLCSARDEHTASAADTSRLSLWGIQRLIQPGADGTFQGRCIPDMTQQGSSEASHNSSVSNVLAASATTLTHVGSTHERDWSALQQKYLLELSCPVLEAIGAPKPAYPYLEEDSGSLAQASSKGGDTLLPVGPRVSSNLNLNNFPVHLSRIRRLRAEKEQDSLNAKLEGVSDFFSTSEKEASYDETYSADLESLSASRSTNAQVFATENAIPDSMTEACEVKQNNLEECLQSCRKPGLMTSSDEDFFQKNACHSNVTTATKADHWSQGWAPLRKNSAVQPGQLSPDSHYPLEEEKTDCQESSKEAVRRHINVSFALPSGPELYLHSAPWNPLSSSLQPPLLETFYVTKSRDALTETALEIPACREVRVPSPPPREAWGFGHNHQALQGAYLKNNLPVLLQNQNSKIASSQQVTAEIPVDLNTREVIRESGKCPGNITEESHDSVYSSVTQNRHFLPSTSTKVCEFENQVVILNKKHSFPALEGGEVTAQSCCGASSDSTESGKSLLFRESEAREEEELDQNTVLRQTINVSLEKDMPGESAVSLKSRSVDRRVSSPVMVAQGGGPTPKWEGKNETGLLEKGLRPKDSSEEFKLPGTKPAYERFQLVACPQERNPSECKSQEMLNPNREPSGKKQNKRVNNTDEMARLIRSVMQLENGILEIESKQNKQVHASHTPGTDKELVFQDQKEQEKTDHAFRPDSSGNPLPSKDQPSSPRQTDDTVFRDSEAGAMEVNSIGNHPQVQKITPNPFRSREGVRESEPVREHTHPAGSDRPARDICDSLGKHTTCREFTNTSLHPQRMKALARALPLQPRLERSSKNNGQFVKASASLKGQPWGLGSLEELETVKGFQESQVAEHVSSSNQEEPKAQGKVEEMPMQRGGSLQEENKVTQKFPSLSQLCRDTFFRQETVSPLLSRTEFCTAPLHQDLSNTLPLNSPRWPRRCLHVPVALGISSLDCVLDLTMLKIHNSPLVTGVEHQDQSTETRSHSPEGNVRGRSSEAHTAWCGSVRSMAMGSHSQSGVPESIPLGTEDRISASTSPQDHGKDLRITLLGFSTSEDFASEAEVAVQKEIRVSSLNKVSSQPEKRVSFSLEEDSDQASKPRQKAEKETEDVGLTSGVSLAPVSLPRVPSPEPRLLEPSDHASMCLAILEEIRQAKAQRKQLHDFVARGTVLSYCETLLEPECSSRVAGRPQCKQIDQSSSDQTRNEGEAPGFHVASLSAEAGQIDLLPDERKVQATSLSADSFESLPNTETDREPWDPVQAFSHAAPAQDRKRRTGELRQFAGASEPFICHSSSSEIIEKKKDATRTPSSADPLAPDSPRSSAPVEEVRRVVSKKVVAALPSQAPYDDPRVTLHELSQSVPQETAEGIPPGSQDSSPEHQEPRTLDTTYGEVSDNLLVTAQGEKTAHFESQSVTCDVQNSTSASGPKQDHVQCPEASTGFEEGRASPKQDTILPGALTRVALEAPTQQCVQCKESVGSGLTEVCRAGSKHSRPIPLPDQRPSANPGGIGEEAPCRHPREALDGPVFSRNPEGSRTLSPSRGKESRTLPCRQPCSSQPVATHAYSSHSSTLLCFRDGDLGKEPFKAAPHTIHPPCVVPSRAYEMDETGEISRGPDVHLTHGLEPKDVNREFRLTESSTCEPSTVAAVLSRAQGCRSPSAPDVRTGSFSHSATDGSVGLIGVPEKKVAEKQASTELEAASFPAGMYSEPLRQFRDSSVGDQNAQVCQTNPEPPATTQGPHTLDLSEGSAESKLVVEPQHECLENTTRCFLEKPQFSTELRDHNRLDSQAKFVARLKHTCSPQEDSPWQEEEQHRDQASGGGEGFAQGVNPLPDEDGLDGCQILDAGREEVAVAKPPVSKILSQGFKDPATVSLRQNETPQPAAQRSGHLYTGREQPAPNHRGSLPVTTIFSGPKHSRSSPTPQFSVVGSSRSLQELNLSVEPPSPTDEDTQGPNRLWNPHLRGYSSGKSVARTSLQAEDSNQKASSRLDDGTTDHRHLKPATPPYPMPSTLSHMPTPDFTTSWMSGTLEQAQQGKREKLGVQVRPENWCSQMDKGMLHFGSSDISPYALPWRPEEPARISWKQYMSGSAVDVSCSQKPQGLTLSNVARCSSMDNGLEDQNSPFHSHLSTYANICDLSTTHSSTENAQGSNEAWEVFRGSSSIALGDPHIPTSPEGVAPTSGHDRRPQFRGPSGEADCLRSKPPLAKGSAAGPVDEIMLLYPSEAGCPVGQTRTNTFEQGTQTLGSRRHWSSTDISFAQPEASAVSAFDLASWTSMHNLSLHLSQLLHSTSELLGSLSQPDVARREQNTKRDIPDKAPQALMMDGSTQTTVDEGSQTDLTLPTLCLQTSEAEPQGANVILEGLGSDTSTVSQEEGDVPGVPQKREAEETAQKMAQLLYLQEESTPYKPQSPSIPSSHLRFQKAPVGQHLPSVSPSVSDAFLPPSSQPEESYCLVVSSPSPSSPHSPGLFPSTSEYPGDSRVQKKLGPTSALFVDRASSPILTLSASTQEPGLSPGSLTLSAPSTHPVEGHQKLDSSPDPVDAPRTPMDNYSQTTDELGGSQRGRSSLQRSNGRSFLELHSPHSPQQSPKLQFSFLGQHPQQLQPRTTIGVQSRLLPPPLRHRSQRLGNSFVPEKVASPEHCPLSGREPSQWQSRTENGGESSASPGEPQRTLDRPSSWGGLQHLSPCPVSELTDTAGLRGSALGLPQACQPEELLCFSCQMCMAPEHQHHSLRDLPVHNKFSNWCGVQKGSPGGLDMTEEELGASGDLSSEKQEQSPPQPPNDHSQDSEWSKREQIPLQVGAQNLSLSVELTEAKLHHGFGEADALLQVLQSGTGEALAADEPVTSTWKELYARQKKAIETLRRERAERLGNFCRTRSLSPQKQLSLLPNKDLFIWDLDLPSRRREYLQQLRKDVVETTRSPESVSRSAHTPSDIELMLQDYQQAHEEAKVEIARARDQLRERTEQEKLRIHQKIISQLLKEEDKLHTLANSSSLCTSSNGSLSSGMTSGYNSSPALSGQLQFPENMGHTNLPDSRDVWIGDERGGHSAVRKNSAYSHRASLGSCCCSPSSLSSLGTCFSSSYQDLAKHVVDTSMADVMAACSDNLHNLFSCQATAGWNYQGEEQAVQLYYKVFSPTRHGFLGAGVVSQPLSRVWAAVSDPTVWPLYYKPIQTARLHQRVTNSISLVYLVCNTTLCALKQPRDFCCVCVEAKEGHLSVMAAQSVYDTSMPRPSRKMVRGEILPSAWILQPITVEGKEVTRVIYLAQVELGAPGFPPQLLSSFIKRQPLVIARLASFLGR

SEQ ID NO: 146 - protein, 198 aa, Homo sapiens
MPLGLLWLGLALLGALHAQAQDSTSDLIPAPPLSKVPLQQNFQDNQFQGKWYVVGLAGNAILREDKDPQKMYATIYELKEDKSYNVTSVLFRKKKCDYWIRTFVPGCQPGEFTLGNIKSYPGLTSYLVRVVSTNYNQHAMVFFKKVSQNREYFKITLYGRTKELTSELKENFIRFSKSLGLPENHIVFPVPIDQCIDG

SEQ ID NO: 147 - protein, 585 aa, Homo sapiens
MTPPRLFWVWLLVAGTQGVNDGDMRLADGGATNQGRVEIFYRGQWGTVCDNLWDLTDASVVCRALGFENATQALGRAAFGQGSGPIMLDEVQCTGTEASLADCKSLGWLKSNCRHERDAGVVCTNETRSTHTLDLSRELSEALGQIFDSQRGCDLSISVNVQGEDALGFCGHTVILTANLEAQALWKEPGSNVTMSVDAECVPMVRDLLRYFYSRRIDITLSSVKCFHKLASAYGARQLQGYCASLFAILLPQDPSFQMPLDLYAYAVATGDALLEKLCLQFLAWNFEALTQAEAWPSVPTDLLQLLLPRSDLAVPSELALLKAVDTWSWGERASHEEVEGLVEKIRFPMMLPEELFELQFNLSLYWSHEALFQKKTLQALEFHTVPFQLLARYKGLNLTEDTYKPRIYTSPTWSAFVTDSSWSARKSQLVYQSRRGPLVKYSSDYFQAPSDYRYYPYQSFQTPQHPSFLFQDKRVSWSLVYLPTIQSCWNYGFSCSSDELPVLGLTKSGGSDRTIAYENKALMLCEGLFVADVTDFEGWKAAIPSALDTNSSKSTSSFPCPAGHFNGFRTVIRPFYLTNSSGVD

SEQ ID NO: 148 - protein, 3907 aa, Homo sapiens
MEDEERQKKLEAGKAKLAQFRQRKAQSDGQSPSKKQKKKRKTSSSKHDVSAHHDLNIDQSQCNEMYINSSQRVESTVIPESTIMRTLHSGEITSHEQGFSVELESEISTTADDCSSEVNGCSFVMRTGKPTNLLREEEFGVDDSYSEQGAQDSPTHLEMMESELAGKQHEIEELNRELEEMRVTYGTEGLQQLQEFEAAIKQRDGIITQLTANLQQARREKDETMREFLELTEQSQKLQIQFQQLQASETLRNSTHSSTAADLLQAKQQILTHQQQLEEQDHLLEDYQKKKEDFTMQISFLQEKIKVYEMEQDKKVENSNKEEIQEKETIIEELNTKIIEEEKKTLELKDKLTTADKLLGELQEQIVQKNQEIKNMKLELTNSKQKERQSSEEIKQLMGTVEELQKRNHKDSQFETDIVQRMEQETQRKLEQLRAELDEMYGQQIVQMKQELIRQHMAQMEEMKTRHKGEMENALRSYSNITVNEDQIKLMNVAINELNIKLQDTNSQKEKLKEELGLILEEKCALQRQLEDLVEELSFSREQIQRARQTIAEQESKLNEAHKSLSTVEDLKAEIVSASESRKELELKHEAEVTNYKIKLEMLEKEKNAVLDRMAESQEAELERLRTQLLFSHEEELSKLKEDLEIEHRINIEKLKDNLGIHYKQQIDGLQNEMSQKIETMQFEKDNLITKQNQLILEISKLKDLQQSLVNSKSEEMTLQINELQKEIEILRQEEKEKGTLEQEVQELQLKTELLEKQMKEKENDLQEKFAQLEAENSILKDEKKTLEDMLKIHTPVSQEERLIFLDSIKSKSKDSVWEKEIEILIEENEDLKQQCIQLNEEIEKQRNTFSFAEKNFEVNYQELQEEYACLLKVKDDLEDSKNKQELEYKSKLKALNEELHLQRINPTTVKMKSSVFDEDKTFVAETLEMGEVVEKDTTELMEKLEVTKREKLELSQRLSDLSEQLKQKHGEISFLNEEVKSLKQEKEQVSLRCRELEIIINHNRAENVQSCDTQVSSLLDGVVTMTSRGAEGSVSKVNKSFGEESKIMVEDKVSFENMTVGEESKQEQLILDHLPSVTKESSLRATQPSENDKLQKELNVLKSEQNDLRLQMEAQRICLSLVYSTHVDQVREYMENEKDKALCSLKEELIFAQEEKIKELQKIHQLELQTMKTQETGDEGKPLHLLIGKLQKAVSEECSYFLQTLCSVLGEYYTPALKCEVNAEDKENSGDYISENEDPELQDYRYEVQDFQENMHTLLNKVTEEYNKLLVLQTRLSKIWGQQTDGMKLEFGEENLPKEETEFLSIHSQMTNLEDIDVNHKSKLSSLQDLEKTKLEEQVQELESLISSLQQQLKETEQNYEAEIHCLQKRLQAVSESTVPPSLPVDSVVITESDAQRTMYPGSCVKKNIDGTIEFSGEFGVKEETNIVKLLEKQYQEQLEEEVAKVIVSMSIAFAQQTELSRISGGKENTASSKQAHAVCQQEQHYFNEMKLSQDQIGFQTFETVDVKFKEEFKPLSKELGEHGKEILLSNSDPHDIPESKDCVLTISEEMFSKDKTFIVRQSIHDEISVSSMDASRQLMLNEEQLEDMRQELVRQYQEHQQATELLRQAHMRQMERQREDQEQLQEEIKRLNRQLAQRSSIDNENLVSERERVLLEELEALKQLSLAGREKLCCELRNSSTQTQNGNENQGEVEEQTFKEKELDRKPEDVPPEILSNERYALQKANNRLLKILLEVVKTTAAVEETIGRHVLGILDRSSKSQSSASLIWRSEAEASVKSCVHEEHTRVTDESIPSYSGSDMPRNDINMWSKVTEEGTELSQRLVRSGFAGTEIDPENEELMLNISSRLQAAVEKLLEAISETSSQLEHAKVTQTELMRESFRQKQEATESLKCQEELRERLHEESRAREQLAVELSKAEGVIDGYADEKTLFERQIQEKTDIIDRLEQELLCASNRLQELEAEQQQIQEERELLSRQKEAMKAEAGPVEQQLLQETEKLMKEKLEVQCQAEKVRDDLQKQVKALEIDVEEQVSRFIELEQEKNTELMDLRQQNQALEKQLEKMRKFLDEQAIDREHERDVFQQEIQKLEQQLKVVPRFQPISEHQTREVEQLANHLKEKTDKCSELLLSKEQLQRDIQERNEEIEKLEFRVRELEQALLVSADTFQKVEDRKHFGAVEAKPELSLEVQLQAERDAIDRKEKEITNLEEQLEQFREELENKNEEVQQLHMQLEIQKKESTTRLQELEQENKLFKDDMEKLGLAIKESDAMSTQDQHVLFGKFAQIIQEKEVEIDQLNEQVTKLQQQLKITTDNKVIEEKNELIRDLETQIECLMSDQECVKRNREEEIEQLNEVIEKLQQELANIGQKTSMNAHSLSEEADSLKHQLDVVIAEKLALEQQVETANEEMTFMKNVLKETNFKMNQLTQELFSLKRERESVEKIQSIPENSVNVAIDHLSKDKPELEVVLTEDALKSLENQTYFKSFEENGKGSIINLETRLLQLESTVSAKDLELTQCYKQIKDMQEQGQFETEMLQKKIVNLQKIVEEKVAAALVSQIQLEAVQEYAKFCQDNQTISSEPERTNIQNLNQLREDELGSDISALTLRISELESQVVEMHTSLILEKEQVEIAEKNVLEKEKKLLELQKLLEGNEKKQREKEKKRSPQDVEVLKTTTELFHSNEESGFFNELEALRAESVATKAELASYKEKAEKLQEELLVKETNMTSLQKDLSQVRDHLAEAKEKLSILEKEDETEVQESKKACMFEPLPIKLSKSIASQTDGTLKISSSNQTPQILVKNAGIQINLQSECSSEEVTEIISQFTEKIEKMQELHAAEILDMESRHISETETLKREHYVAVQLLKEECGTLKAVIQCLRSKEGSSIPELAHSDAYQTREICSSDSGSDWGQGIYLTHSQGFDIASEGRGEESESATDSFPKKIKGLLRAVHNEGMQVLSLTESPYSDGEDHSIQQVSEPWLEERKAYINTISSLKDLITKMQLQREAEVYDSSQSHESFSDWRGELLLALQQVFLEERSVLLAAFRTELTALGTTDAVGLLNCLEQRIQEQGVEYQAAMECLQKADRRSLLSEIQALHAQMNGRKITLKREQESEKPSQELLEYNIQQKQSQMLEMQVELSSMKDRATELQEQLSSEKMVVAELKSELAQTKLELETTLKAQHKHLKELEAFRLEVKDKTDEVHLLNDTLASEQKKSRELQWALEKEKAKLGRSEERDKEELEDLKFSLESQKQRNLQLNLLLEQQKQLLNESQQKIESQRMLYDAQLSEEQGRNLELQVLLESEKVRIREMSSTLDRERELHAQLQSSDGTGQSRPPLPSEDLLKELQKQLEEKHSRIVELLNETEKYKLDSLQTRQQMEKDRQVHRKTLQTEQEANTEGQKKMHELQSKVEDLQRQLEEKRQQVYKLDLEGQRLQGIMQEFQKQELEREEKRESRRILYQNLNEPTTWSLTSDRTRNWVLQQKIEGETKESNYAKLIEMNGGGTGCNHELEMIRQKLQCVASKLQVLPQKASERLQFETADDEDFIWVQENIDEIILQLQKLTGQQGEEPSLVSPSTSCGSLTERLLRQNAELTGHISQLTEEKNDLRNMVMKLEEQIRWYRQTGAGRDNSSRFSLNGGANIEAIIASEKEVWNREKLTLQKSLKRAEAEVYKLKAELRNDSLLQTLSPDSEHVTLKRIYGKYLRAESFRKALIYQKKYLLLLLGGFQECEDATLALLARMGGQPAFTDLEVITNRPKGFTRFRSAVRVSIAISRMKFLVRRWHRVTGSVSININRDGFGLNQGAEKTDSFYHSSGGLELYGEPRHTTYRSRSDLDYIRSPLPFQNRYPGTPADFNPGSLACSQLQNYDPDRALTDYITRLEALQRRLGTIQSGSTTQFHAGMRR

SEQ ID NO: 149 - protein, 8525 aa, Homo sapiens
MADDEDYEEVVEYYTEEVVYEEVPGETITKIYETTTTRTSDYEQSETSKPALAQPALAQPASAKPVERRKVIRKKVDPSKFMTPYIAHSQKMQDLFSPNKYKEKFEKTKGQPYASTTDTPELRRIKKVQDQLSEVKYRMDGDVAKTICHVDEKAKDIEHAKKVSQQVSKVLYKQNWEDTKDKYLLPPDAPELVQAVKNTAMFSKKLYTEDWEADKSLFYPYNDSPELRRVAQAQKALSDVAYKKGLAEQQAQFTPLADPPDIEFAKKVTNQVSKQKYKEDYENKIKGKWSETPCFEVANARMNADNISTRKYQEDFENMKDQIYFMQTETPEYKMNKKAGVAASKVKYKEDYEKNKGKADYNVLPASENPQLRQLKAAGDALSDKLYKENYEKTKAKSINYCETPKFKLDTVLQNFSSDKKYKDSYLKDILGHYVGSFEDPYHSHCMKVTAQNSDKNYKAEYEEDRGKGFFPQTITQEYEAIKKLDQCKDHTYKVHPDKTKFTQVTDSPVLLQAQVNSKQLSDLNYKAKHESEKFKCHIPPDTPAFIQHKVNAYNLSDNLYKQDWEKSKAKKFDIKVDAIPLLAAKANTKNTSDVMYKKDYEKNKGKMIGVLSINDDPKMLHSLKVAKNQSDRLYKENYEKTKAKSMNYCETPKYQLDTQLKNFSEARYKDLYVKDVLGHYVGSMEDPYHTHCMKVAAQNSDKSYKAEYEEDKGKCYFPQTITQEYEAIKKLDQCKDHTYKVHPDKTKFTAVTDSPVLLQAQLNTKQLSDLNYKAKHEGEKFKCHIPADAPQFIQHRVNAYNLSDNVYKQDWEKSKAKKFDIKVDAIPLLAAKANTKNTSDVMYKKDYEKSKGKMIGALSINDDPKMLHSLKTAKNQSDREYRKDYEKSKTIYTAPLDMLQVTQAKKSQAIASDVDYKHILHSYSYPPDSINVDLAKKAYALQSDVEYKADYNSWMKGCGWVPFGSLEMEKAKRASDILNEKKYRQHPDTLKFTSIEDAPITVQSKINQAQRSDIAYKAKGEEIIHKYNLPPDLPQFIQAKVNAYNISENMYKADLKDLSKKGYDLRTDAIPIRAAKAARQAASDVQYKKDYEKAKGKMVGFQSLQDDPKLVHYMNVAKIQSDREYKKDYEKTKSKYNTPHDMFNVVAAKKAQDVVSNVNYKHSLHHYTYLPDAMDLELSKNMMQIQSDNVYKEDYNNWMKGIGWIPIGSLDVEKVKKAGDALNEKKYRQHPDTLKFTSIVDSPVMVQAKQNTKQVSDILYKAKGEDVKHKYTMSPDLPQFLQAKCNAYNISDVCYKRDWHDLIAKGNNVLGDAIPITAAKASRNIASDYKYKEAYEKSKGKHVGFRSLQDDPKLVHYMNVAKLQSDREYKKNYENTKTSYHTPGDMVSITAAKMAQDVATNVNYKQPLHHYTYLPDAMSLEHTRNVNQIQSDNVYKDEYNSFLKGIGWIPIGSLEVEKVKKAGDALNERKYRQHPDTVKFTSVPDSMGMVLAQHNTKQLSDLNYKVEGEKLKHKYTIDPELPQFIQAKVNALNMSDAHYKADWKKTIAKGYDLRPDAIPIVAAKSSRNIASDCKYKEAYEKAKGKQVGFLSLQDDPKLVHYMNVAKIQSDREYKKGYEASKTKYHTPLDMVSVTAAKKSQEVATNANYRQSYHHYTLLPDALNVEHSRNAMQIQSDNLYKSDFTNWMKGIGWVPIESLEVEKAKKAGEILSEKKYRQHPEKLKFTYAMDTMEQALNKSNKLNMDKRLYTEKWNKDKTTIHVMPDTPDILLSRVNQITMSDKLYKAGWEEEKKKGYDLRPDAIAIKAARASRDIASDYKYKKAYEQAKGKHIGFRSLEDDPKLVHFMQVAKMQSDREYKKGYEKSKTSFHTPVDMLSVVAAKKSQEVATNANYRNVIHTYNMLPDAMSFELAKNMMQIQSDNQYKADYADFMKGIGWLPLGSLEAEKNKKAMEIISEKKYRQHPDTLKYSTLMDSMNMVLAQNNAKIMNEHLYKQAWEADKTKVHIMPDIPQIILAKANAINMSDKLYKLSLEESKKKGYDLRPDAIPIKAAKASRDIASDYKYKYNYEKGKGKMVGFRSLEDDPKLVHSMQVAKMQSDREYKKNYENTKTSYHTPADMLSVTAAKDAQANITNTNYKHLIHKYILLPDAMNIELTRNMNRIQSDNEYKQDYNEWYKGLGWSPAGSLEVEKAKKATEYASDQKYRQHPSNFQFKKLTDSMDMVLAKQNAHTMNKHLYTIDWNKDKTKIHVMPDTPDILQAKQNQTLYSQKLYKLGWEEALKKGYDLPVDAISVQLAKASRDIASDYKYKQGYRKQLGHHVGFRSLQDDPKLVLSMNVAKMQSEREYKKDFEKWKTKFSSPVDMLGVVLAKKCQELVSDVDYKNYLHQWTCLPDQNDVVQAKKVYELQSENLYKSDLEWLRGIGWSPLGSLEAEKNKRASEIISEKKYRQPPDRNKFTSIPDAMDIVLAKTNAKNRSDRLYREAWDKDKTQIHIMPDTPDIVLAKANLINTSDKLYRMGYEELKRKGYDLPVDAIPIKAAKASREIASEYKYKEGFRKQLGHHIGARNIEDDPKMMWSMHVAKIQSDREYKKDFEKWKTKFSSPVDMLGVVLAKKCQTLVSDVDYKNYLHQWTCLPDQSDVIHARQAYDLQSDNLYKSDLQWLKGIGWMTSGSLEDEKNKRATQILSDHVYRQHPDQFKFSSLMDSIPMVLAKNNAITMNHRLYTEAWDKDKTTVHIMPDTPEVLLAKQNKVNYSEKLYKLGLEEAKRKGYDMRVDAIPIKAAKASRDIASEFKYKEGYRKQLGHHIGARAIRDDPKMMWSMHVAKIQSDREYKKDFEKWKTKFSSPVDMLGVVLAKKCQTLVSDVDYKNYLHQWTCLPDQSDVIHARQAYDLQSDNMYKSDLQWMRGIGWVSIGSLDVEKCKRATEILSDKIYRQPPDRFKFTSVTDSLEQVLAKNNAITMNKRLYTEAWDKDKTQIHIMPDTPEIMLARMNKINYSESLYKLANEEAKKKGYDLRSDAIPIVAAKASRDIISDYKYKDGYCKQLGHHIGARNIEDDPKMMWSMHVAKIQSDREYKKDFEKWKTKFSSPVDMLGVVLAKKCQTLVSDVDYKNYLHEWTCLPDQSDVIHARQAYDLQSDNIYKSDLQWLRGIGWVPIGSMDVVKCKRATEILSDNIYRQPPDKLKFTSVTDSLEQVLAKNNALNMNKRLYTEAWDKDKTQIHIMPDTPEIMLARQNKINYSETLYKLANEEAKKKGYDLRSDAIPIVAAKASRDVISDYKYKDGYRKQLGHHIGARNIEDDPKMMWSMHVAKIQSDREYKKDFEKWKTKFSSPVDMLGVVLAKKCQTLVSDVDYKNYLHEWTCLPDQNDVIHARQAYDLQSDNIYKSDLQWLRGIGWVPIGSMDVVKCKRAAEILSDNIYRQPPDKLKFTSVTDSLEQVLAKNNALNMNKRLYTEAWDKDKTQVHIMPDTPEIMLARQNKINYSESLYRQAMEEAKKEGYDLRSDAIPIVAAKASRDIASDYKYKEAYRKQLGHHIGARAVHDDPKIMWSLHIAKVQSDREYKKDFEKYKTRYSSPVDMLGIVLAKKCQTLVSDVDYKHPLHEWICLPDQNDIIHARKAYDLQSDNLYKSDLEWMKGIGWVPIDSLEVVRAKRAGELLSDTIYRQRPETLKFTSITDTPEQVLAKNNALNMNKRLYTEAWDNDKKTIHVMPDTPEIMLAKLNRINYSDKLYKLALEESKKEGYDLRLDAIPIQAAKASRDIASDYKYKEGYRKQLGHHIGARNIKDDPKMMWSIHVAKIQSDREYKKEFEKWKTKFSSPVDMLGVVLAKKCQILVSDIDYKHPLHEWTCLPDQNDVIQARKAYDLQSDAIYKSDLEWLRGIGWVPIGSVEVEKVKRAGEILSDRKYRQPADQLKFTCITDTPEIVLAKNNALTMSKHLYTEAWDADKTSIHVMPDTPDILLAKSNSANISQKLYTKGWDESKMKDYDLRADAISIKSAKASRDIASDYKYKEAYEKQKGHHIGAQSIEDDPKIMCAIHAGKIQSEREYKKEFQKWKTKFSSPVDMLSILLAKKCQTLVTDIDYRNYLHEWTCMPDQNDIIQAKKAYDLQSDSVYKADLEWLRGIGWMPEGSVEMNRVKVAQDLVNERLYRTRPEALSFTSIVDTPEVVLAKANSLQISEKLYQEAWNKDKSNITIPSDTPEMLQAHINALQISNKLYQKDWNDAKQKGYDIRADAIEIKHAKASREIASEYKYKEGYRKQLGHHMGFRTLQDDPKSVWAIHAAKIQSDREYKKAYEKSKGIHNTPLDMMSIVQAKKCQVLVSDIDYRNYLHQWTCLPDQNDVIQAKKAYDLQSDNLYKSDLEWLKGIGWLPEGSVEVMRVKNAQNLLNERLYRIKPEALKFTSIVDTPEVIQAKINAVQISEPLYRDAWEKEKANVNVPADTPLMLQSKINALQISNKRYQQAWEDVKMTGYDLRADAIGIQHAKASRDIASDYLYKTAYEKQKGHYIGCRSAKEDPKLVWAANVLKMQNDRLYKKAYNDHKAKISIPVDMVSISAAKEGQALASDVDYRHYLHHWSCFPDQNDVIQARKAYDLQSDSVYKADLEWLRGIGWMPEGSVEMNRVKVAQDLVNERLYRTRPEALSFTSIVDTPEVVLAKANSLQISEKLYQEAWNKDKSNITIPSDTPEMLQAHINALQISNKLYQKDWNDTKQKGYDIRADAIEIKHAKASREIASEYKYKEGYRKQLGHHMGFRTLQDDPKSVWAIHAAKIQSDREYKKAYEKSKGIHNTPLDMMSIVQAKKCQVLVSDIDYRNYLHQWTCLPDQNDVIQAKKAYDLQSDNLYKSDLEWLKGIGWLPEGSVEVMRVKNAQNLLNERLYRIKPEALKFTSIVDTPEVIQAKINAVQISEPLYRNAWEKEKANVNVPADTPLMLQSKINALQISNKRYQQAWEDVKMTGYDLRADAIGIQHAKASRDIASDYLYKTAYEKQKGHYIGCRSAKEDPKLVWAANVLKMQNDRLYKKAYNDHKAKISIPVDMVSISAAKEGQALASDVDYRHYLHHWSCFPDQNDVIQARKAYDLQSDSVYKADLEWLRGIGWMPEGSVEMNRVKVAQDLVNERLYRTRPEALSFTSIVDTPEVVLAKANSLQISEKLYQEAWNKDKSNITIPSDTPEMLQAHINALQISNKLYQKDWNDTKQKGYDIRADAIEIKHAKASREIASEYKYKEGYRKQLGHHMGFRTLQDDPKSVWAIHAAKIQSDREYKKAYEKSKGIHNTPLDMMSIVQAKKCQVLVSDIDYRNYLHQWTCLPDQNDVIQAKKAYDLQSDNLYKSDLEWLKGIGWLPEGSVEVMRVKNAQNLLNERLYRIKPEALKFTSIVDTPEVIQAKINAVQISEPLYRDAWEKEKANVNVPADTPLMLQSKINALQISNKRYQQAWEDVKMTGYDLRADAIGIQHAKASRDIASDYLYKTAYEKQKGHYIGCRSAKEDPKLVWAANVLKMQNDRLYKKAYNDHKAKISIPVDMVSISAAKEGQALASDVDYRHYLHRWSCFPDQNDVIQARKAYDLQSDALYKADLEWLRGIGWMPQGSPEVLRVKNAQNIFCDSVYRTPVVNLKYTSIVDTPEVVLAKSNAENISIPKYREVWDKDKTSIHIMPDTPEINLARANALNVSNKLYREGWDEMKAGCDVRLDAIPIQAAKASREIASDYKYKLDHEKQKGHYVGTLTARDDNKIRWALIADKLQNEREYRLDWAKWKAKIQSPVDMLSILHSKNSQALVSDMDYRNYLHQWTCMPDQNDVIQAKKAYELQSDNVYKADLEWLRGIGWMPNDSVSVNHAKHAADIFSEKKYRTKIETLNFTPVDDRVDYVTAKQSGEILDDIKYRKDWNATKSKYTLTETPLLHTAQEAARILDQYLYKEGWERQKATGYILPPDAVPFVHAHHCNDVQSELKYKAEHVKQKGHYVGVPTMRDDPKLVWFEHAGQIQNERLYKEDYHKTKAKINIPADMVSVLAAKQGQTLVSDIDYRNYLHQWMCHPDQNDVIQARKAYDLQSDNVYRADLEWLRGIGWIPLDSVDHVRVTKNQEMMSQIKYKKNALENYPNFRSVVDPPEIVLAKINSVNQSDVKYKETFNKAKGKYTFSPDTPHISHSKDMGKLYSTILYKGAWEGTKAYGYTLDERYIPIVGAKHADLVNSELKYKETYEKQKGHYLAGKVIGEFPGVVHCLDFQKMRSALNYRKHYEDTKANVHIPNDMMNHVLAKRCQYILSDLEYRHYFHQWTSLLEEPNVIRVRNAQEILSDNVYKDDLNWLKGIGCYVWDTPQILHAKKSYDLQSQLQYTAAGKENLQNYNLVTDTPLYVTAVQSGINASEVKYKENYHQIKDKYTTVLETVDYDRTRNLKNLYSSNLYKEAWDRVKATSYILPSSTLSLTHAKNQKHLASHIKYREEYEKFKALYTLPRSVDDDPNTARCLRVGKLNIDRLYRSVYEKNKMKIHIVPDMVEMVTAKDSQKKVSEIDYRLRLHEWICHPDLQVNDHVRKVTDQISDIVYKDDLNWLKGIGCYVWDTPEILHAKHAYDLRDDIKYKAHMLKTRNDYKLVTDTPVYVQAVKSGKQLSDAVYHYDYVHSVRGKVAPTTKTVDLDRALHAYKLQSSNLYKTSLRTLPTGYRLPGDTPHFKHIKDTRYMSSYFKYKEAYEHTKAYGYTLGPKDVPFVHVRRVNNVTSERLYRELYHKLKDKIHTTPDTPEIRQVKKTQEAVSELIYKSDFFKMQGHMISLPYTPQVIHCRYVGDITSDIKYKEDLQVLKGFGCFLYDTPDMVRSRHLRKLWSNYLYTDKARKMRDKYKVVLDTPEYRKVQELKTHLSELVYRAAGKKQKSIFTSVPDTPDLLRAKRGQKLQSQYLYVELATKERPHHHAGNQTTALKHAKDVKDMVSEKKYKIQYEKMKDKYTPVPDTPILIRAKRAYWNASDLRYKETFQKTKGKYHTVKDALDIVYHRKVTDDISKIKYKENYMSQLGIWRSIPDRPEHFHHRAVTDTVSDVKYKEDLTWLKGIGCYAYDTPDFTLAEKNKTLYSKYKYKEVFERTKSDFKYVADSPINRHFKYATQLMNEKKYRADYEQRKDKYHLVVDEPRHLLAKTAGDQISQIKYRKNYEKSKDKFTSIVDTPEHLRTTKVNKQISDILYKLEYNKAKPRGYTTIHDTPMLLHVRKVKDEVSDLKYKEVYQRNKSNCTIEPDAVHIKAAKDAYKVNTNLDYKKQYEANKAHWKWTPDRPDFLQAAKSSLQQSDFEYKLDREFLKGCKLSVTDDKNTVLALRNTLIESDLKYKEKHVKERGTCHAVPDTPQILLAKTVSNLVSENKYKDHVKKHLAQGSYTTLPETRDTVHVKEVTKHVSDTNYKKKFVKEKGKSNYSIMLEPPEVKHAMEVAKKQSDVAYRKDAKENLHYTTVADRPDIKKATQAAKQASEVEYRAKHRKEGSHGLSMLGRPDIEMAKKAAKLSSQVKYRENFDKEKGKTPKYNPKDSQLYKVMKDANNLASEVKYKADLKKLHKPVTDMKESLIMNHVLNTSQLASSYQYKKKYEKSKGHYHTIPDNLEQLHLKEATELQSIVKYKEKYEKERGKPMLDFETPTYITAKESQQMQSGKEYRKDYEESIKGRNLTGLEVTPALLHVKYATKIASEKEYRKDLEESIRGKGLTEMEDTPDMLRAKNATQILNEKEYKRDLELEVKGRGLNAMANETPDFMRARNATDIASQIKYKQSAEMEKANFTSVVDTPEIIHAQQVKNLSSQKKYKEDAEKSMSYYETVLDTPEIQRVRENQKNFSLLQYQCDLKNSKGKITVVQDTPEILRVKENQKNFSSVLYKEDVSPGTAIGKTPEMMRVKQTQDHISSVKYKEAIGQGTPIPDLPEVKRVKETQKHISSVMYKENLGTGIPTTVTPEIERVKRNQENFSSVLYKENLGKGIPTPITPEMERVKRNQENFSSILYKENLSKGTPLPVTPEMERVKLNQENFSSVLYKENVGKGIPIPITPEMERVKHNQENFSSVLYKENLGTGIPIPITPEMQRVKHNQENLSSVLYKENMGKGTPLPVTPEMERVKHNQENISSVLYKENMGKGTPLPVTPEMERVKHNQENISSVLYKENMGKGTPLAVTPEMERVKHNQENISSVLYKENVGKATATPVTPEMQRVKRNQENISSVLYKENLGKATPTPFTPEMERVKRNQENFSSVLYKENMRKATPTPVTPEMERAKRNQENISSVLYSDSFRKQIQGKAAYVLDTPEMRRVRETQRHISTVKYHEDFEKHKGCFTPVVTDPITERVKKNMQDFSDINYRGIQRKVVEMEQKRNDQDQETITGLRVWRTNPGSVFDYDPAEDNIQSRSLHMINVQAQRRSREQSRSASALSISGGEEKSEHSEAPDHHLSTYSDGGVFAVSTAYKHAKTTELPQQRSSSVATQQTTVSSIPSHPSTAGKIFRAMYDYMAADADEVSFKDGDAIINVQAIDEGWMYGTVQRTGRTGMLPANYVEAI

SEQ ID NO: 150 - protein, 3177 aa, Homo sapiens
MRKHRHLPLVAVFCLFLSGFPTTHAQQQQADVKNGAAADIIFLVDSSWTIGEEHFQLVREFLYDVVKSLAVGENDFHFALVQFNGNPHTEFLLNTYRTKQEVLSHISNMSYIGGTNQTGKGLEYIMQSHLTKAAGSRAGDGVPQVIVVLTDGHSKDGLALPSAELKSADVNVFAIGVEDADEGALKEIASEPLNMHMFNLENFTSLHDIVGNLVSCVHSSVSPERAGDTETLKDITAQDSADIIFLIDGSNNTGSVNFAVILDFLVNLLEKLPIGTQQIRVGVVQFSDEPRTMFSLDTYSTKAQVLGAVKALGFAGGELANIGLALDFVVENHFTRAGGSRVEEGVPQVLVLISAGPSSDEIRYGVVALKQASVFSFGLGAQAASRAELQHIATDDNLVFTVPEFRSFGDLQEKLLPYIVGVAQRHIVLKPPTIVTQVIEVNKRDIVFLVDGSSALGLANFNAIRDFIAKVIQRLEIGQDLIQVAVAQYADTVRPEFYFNTHPTKREVITAVRKMKPLDGSALYTGSALDFVRNNLFTSSAGYRAAEGIPKLLVLITGGKSLDEISQPAQELKRSSIMAFAIGNKGADQAELEEIAFDSSLVFIPAEFRAAPLQGMLPGLLAPLRTLSGTPEVHSNKRDIIFLLDGSANVGKTNFPYVRDFVMNLVNSLDIGNDNIRVGLVQFSDTPVTEFSLNTYQTKSDILGHLRQLQLQGGSGLNTGSALSYVYANHFTEAGGSRIREHVPQLLLLLTAGQSEDSYLQAANALTRAGILTFCVGASQANKAELEQIAFNPSLVYLMDDFSSLPALPQQLIQPLTTYVSGGVEEVPLAQPESKRDILFLFDGSANLVGQFPVVRDFLYKIIDELNVKPEGTRIAVAQYSDDVKVESRFDEHQSKPEILNLVKRMKIKTGKALNLGYALDYAQRYIFVKSAGSRIEDGVLQFLVLLVAGRSSDRVDGPASNLKQSGVVPFIFQAKNADPAELEQIVLSPAFILAAESLPKIGDLHPQIVNLLKSVHNGAPAPVSGEKDVVFLLDGSEGVRSGFPLLKEFVQRVVESLDVGQDRVRVAVVQYSDRTRPEFYLNSYMNKQDVVNAVRQLTLLGGPTPNTGAALEFVLRNILVSSAGSRITEGVPQLLIVLTADRSGDDVRNPSVVVKRGGAVPIGIGIGNADITEMQTISFIPDFAVAIPTFRQLGTVQQVISERVTQLTREELSRLQPVLQPLPSPGVGGKRDVVFLIDGSQSAGPEFQYVRTLIERLVDYLDVGFDTTRVAVIQFSDDPKVEFLLNAHSSKDEVQNAVQRLRPKGGRQINVGNALEYVSRNIFKRPLGSRIEEGVPQFLVLISSGKSDDEVDDPAVELKQFGVAPFTIARNADQEELVKISLSPEYVFSVSTFRELPSLEQKLLTPITTLTSEQIQKLLASTRYPPPAVESDAADIVFLIDSSEGVRPDGFAHIRDFVSRIVRRLNIGPSKVRVGVVQFSNDVFPEFYLKTYRSQAPVLDAIRRLRLRGGSPLNTGKALEFVARNLFVKSAGSRIEDGVPQHLVLVLGGKSQDDVSRFAQVIRSSGIVSLGVGDRNIDRTELQTITNDPRLVFTVREFRELPNIEERIMNSFGPSAATPAPPGVDTPPPSRPEKKKADIVFLLDGSINFRRDSFQEVLRFVSEIVDTVYEDGDSIQVGLVQYNSDPTDEFFLKDFSTKRQIIDAINKVVYKGGRHANTKVGLEHLRVNHFVPEAGSRLDQRVPQIAFVITGGKSVEDAQDVSLALTQRGVKVFAVGVRNIDSEEVGKIASNSATAFRVGNVQELSELSEQVLETLHDAMHETLCPGVTDAAKACNLDVILGFDGSRDQNVFVAQKGFESKVDAILNRISQMHRVSCSGGRSPTVRVSVVANTPSGPVEAFDFDEYQPEMLEKFRNMRSQHPYVLTEDTLKVYLNKFRQSSPDSVKVVIHFTDGADGDLADLHRASENLRQEGVRALILVGLERVVNLERLMHLEFGRGFMYDRPLRLNLLDLDYELAEQLDNIAEKACCGVPCKCSGQRGDRGPIGSIGPKGIPGEDGYRGYPGDEGGPGERGPPGVNGTQGFQGCPGQRGVKGSRGFPGEKGEVGEIGLDGLDGEDGDKGLPGSSGEKGNPGRRGDKGPRGEKGERGDVGIRGDPGNPGQDSQERGPKGETGDLGPMGVPGRDGVPGGPGETGKNGGFGRRGPPGAKGNKGGPGQPGFEGEQGTRGAQGPAGPAGPPGLIGEQGISGPRGSGGAAGAPGERGRTGPLGRKGEPGEPGPKGGIGNRGPRGETGDDGRDGVGSEGRRGKKGERGFPGYPGPKGNPGEPGLNGTTGPKGIRGRRGNSGPPGIVGQKGDPGYPGPAGPKGNRGDSIDQCALIQSIKDKCPCCYGPLECPVFPTELAFALDTSEGVNQDTFGRMRDVVLSIVNDLTIAESNCPRGARVAVVTYNNEVTTEIRFADSKRKSVLLDKIKNLQVALTSKQQSLETAMSFVARNTFKRVRNGFLMRKVAVFFSNTPTRASPQLREAVLKLSDAGITPLFLTRQEDRQLINALQINNTAVGHALVLPAGRDLTDFLENVLTCHVCLDICNIDPSCGFGSWRPSFRDRRAAGSDVDIDMAFILDSAETTTLFQFNEMKKYIAYLVRQLDMSPDPKASQHFARVAVVQHAPSESVDNASMPPVKVEFSLTDYGSKEKLVDFLSRGMTQLQGTRALGSAIEYTIENVFESAPNPRDLKIVVLMLTGEVPEQQLEEAQRVILQAKCKGYFFVVLGIGRKVNIKEVYTFASEPNDVFFKLVDKSTELNEEPLMRFGRLLPSFVSSENAFYLSPDIRKQCDWFQGDQPTKNLVKFGHKQVNVPNNVTSSPTSNPVTTTKPVTTTKPVTTTTKPVTTTTKPVTIINQPSVKPAAAKPAPAKPVAAKPVATKMATVRPPVAVKPATAAKPVAAKPAAVRPPAAAAAKPVATKPEVPRPQAAKPAATKPATTKPMVKMSREVQVFEITENSAKLHWERAEPPGPYFYDLTVTSAHDQSLVLKQNLTVTDRVIGGLLAGQTYHVAVVCYLRSQVRATYHGSFSTKKSQPPPPQPARSASSSTINLMVSTEPLALTETDICKLPKDEGTCRDFILKWYYDPNTKSCARFWYGGCGGNENKFGSQKECEKVCAPVLAKPGVISVMGT

SEQ ID NO: 151 - protein, 2825 aa, Homo sapiens
MYASLGSGPVAPLPASVPPSVLGSWSTGGSRSCVRQETKSPGGARTSGHWASVWQEVLKQLQGSIEDEAMASSGQIDLLERLKELNLDSSNFPGVKLRSKMSLRSYGSREGSVSSRSGECSPVPMGSFPRRGFVNGSRESTGYLEELEKERSLLLADLDKEEKEKDWYYAQLQNLTKRIDSLPLTENFSLQTDMTRRQLEYEARQIRVAMEEQLGTCQDMEKRAQRSSQNKHETGSHDAERQNEGQGVGEINMATSGNGQGSTTRMDHETASVLSSSSTHSAPRRLTSHLGTKVEMVYSLLSMLGTHDKDDMSRTLLAMSSSQDSCISMRQSGCLPLLIQLLHGNDKDSVLLGNSRGSKEARARASAALHNIIHSQPDDKRGRREIRVLHLLEQIRAYCETCWEWQEAHEPGMDQDKNPMPAPVEHQICPAVCVLMKLSFDEEHRHAMNELGGLQAIAELLQVDCEMYGLTNDHYSITLRRYAGMALTNLTFGDVANKATLCSMKGCMRALVAQLKSESEDLQQVIASVLRNLSWRADVNSKKTLREVGSVKALMECALEVKKESTLKSVLSALWNLSAHCTENKADICAVDGALAFLVGTLTYRSQTNTLAIIESGGGILRNVSSLIATNEDHRQILRENNCLQTLLQHLKSHSLTIVSNACGTLWNLSARNPKDQEALWDMGAVSMLKNLIHSKHKMIAMGSAAALRNLMANRPAKYKDANIMSPGSSLPSLHVRKQKALEAELDAQHLSETFDNIDNLSPKASHRSKQRHKQSLYGDYVFDTNRHDDNRSDNFNTGNMTVLSPYLNTTVLPSSSSSRGSLDSSRSEKDRSLERERGIGLGNYHPATENPGTSSKRGLQISTTAAQIAKVMEEVSAIHTSQEDRSSGSTTELHCVTDERNALRRSSAAHTHSNTYNFTKSENSNRTCSMPYAKLEYKRSSNDSLNSVSSSDGYGKRGQMKPSIESYSEDDESKFCSYGQYPADLAHKIHSANHMDDNDGELDTPINYSLKYSDEQLNSGRQSPSQNERWARPKHIIEDEIKQSEQRQSRNQSTTYPVYTESTDDKHLKFQPHFGQQECVSPYRSRGANGSETNRVGSNHGINQNVSQSLCQEDDYEDDKPTNYSERYSEEEQHEEEERPTNYSIKYNEEKRHVDQPIDYSLKYATDIPSSQKQSFSFSKSSSGQSSKTEHMSSSSENTSTPSSNAKRQNQLHPSSAQSRSGQPQKAATCKVSSINQETIQTYCVEDTPICFSRCSSLSSLSSAEDEIGCNQTTQEADSANTLQIAEIKEKIGTRSAEDPVSEVPAVSQHPRTKSSRLQGSSLSSESARHKAVEFSSGAKSPSKSGAQTPKSPPEHYVQETPLMFSRCTSVSSLDSFESRSIASSVQSEPCSGMVSGIISPSDLPDSPGQTMPPSRSKTPPPPPQTAQTKREVPKNKAPTAEKRESGPKQAAVNAAVQRVQVLPDADTLLHFATESTPDGFSCSSSLSALSLDEPFIQKDVELRIMPPVQENDNGNETESEQPKESNENQEKEAEKTIDSEKDLLDDSDDDDIEILEECIISAMPTKSSRKAKKPAQTASKLPPPVARKPSQLPVYKLLPSQNRLQPQKHVSFTPGDDMPRVYCVEGTPINFSTATSLSDLTIESPPNELAAGEGVRGGAQSGEFEKRDTIPTEGRSTDEAQGGKTSSVTIPELDDNKAEEGDILAECINSAMPKGKSHKPFRVKKIMDQVQQASASSSAPNKNQLDGKKKKPTSPVKPIPQNTEYRTRVRKNADSKNNLNAERVFSDNKDSKKQNLKNNSKVFNDKLPNNEDRVRGSFAFDSPHHYTPIEGTPYCFSRNDSLSSLDFDDDDVDLSREKAELRKAKENKESEAKVTSHTELTSNQQSANKTQAIAKQPINRGQPKPILQKQSTFPQSSKDIPDRGAATDEKLQNFAIENTPVCFSHNSSLSSLSDIDQENNNKENEPIKETEPPDSQGEPSKPQASGYAPKSFHVEDTPVCFSRNSSLSSLSIDSEDDLLQECISSAMPKKKKPSRLKGDNEKHSPRNMGGILGEDLTLDLKDIQRPDSEHGLSPDSENFDWKAIQEGANSIVSSLHQAAAAACLSRQASSDSDSILSLKSGISLGSPFHLTPDQEEKPFTSNKGPRILKPGEKSTLETKKIESESKGIKGGKKVYKSLITGKVRSNSEISGQMKQPLQANMPSISRGRTMIHIPGVRNSSSSTSPVSKKGPPLKTPASKSPSEGQTATTSPRGAKPSVKSELSPVARQTSQIGGSSKAPSRSGSRDSTPSRPAQQPLSRPIQSPGRNSISPGRNGISPPNKLSQLPRTSSPSTASTKSSGSGKMSYTSPGRQMSQQNLTKQTGLSKNASSIPRSESASKGLNQMNNGNGANKKVELSRMSSTKSSGSESDRSERPVLVRQSTFIKEAPSPTLRRKLEESASFESLSPSSRPASPTRSQAQTPVLSPSLPDMSLSTHSSVQAGGWRKLPPNLSPTIEYNDGRPAKRHDIARSHSESPSRLPINRSGTWKREHSKHSSSLPRVSTWRRTGSSSSILSASSESSEKAKSEDEKHVNSISGTKQSKENQVSAKGTWRKIKENEFSPTNSTSQTVSSGATNGAESKTLIYQMAPAVSKTEDVWVRIEDCPINNPRSGRSPTGNTPPVIDSVSEKANPNIKDSKDNQAKQNVGNGSVPMRTVGLENRLNSFIQVDAPDQKGTEIKPGQNNPVPVSETNESSIVERTPFSSSSSSKHSSPSGTVAARVTPFNYNPSPRKSSADSTSARPSQIPTPVNNNTKKRDSKTDSTESSGTQSPKRHSGSYLVTSV

SEQ ID NO: 152 - protein, 214 aa, Homo sapiens
MRPKTGQVGCETPEELGPGPRQRWPLLLLGLAMVAHGLLRPMVAPQSGDPDPGASVGSSRSSLRSLWGRLLLQPSPQRADPRCWPRGFWSEPQSLCYVFGTGTKVTVLGQPKANPTVTLFPPSSEELQANKATLVCLISDFYPGAVTVAWKADGSPVKAGVETTKPSKQSNNKYAASSYLSLTPEQWKSHRSYSCQVTHEGSTVEKTVAPTECS

SEQ ID NO: 153 - protein, 327 aa, Homo sapiens
ASTKGPSVFPLAPCSRSTSESTAALGCLVKDYFPEPVTVSWNSGALTSGVHTFPAVLQSSGLYSLSSVVTVPSSSLGTKTYTCNVDHKPSNTKVDKRVESKYGPPCPSCPAPEFLGGPSVFLFPPKPKDTLMISRTPEVTCVVVDVSQEDPEVQFNWYVDGVEVHNAKTKPREEQFNSTYRVVSVLTVLHQDWLNGKEYKCKVSNKGLPSSIEKTISKAKGQPREPQVYTLPPSQEEMTKNQVSLTCLVKGFYPSDIAVEWESNGQPENNYKTTPPVLDSDGSFFLYSRLTVDKSRWQEGNVFSCSVMHEALHNHYTQKSLSLSLGK

SEQ ID NO: 154 - protein, 2968 aa, Homo sapiens
MDGRDFGPQRSVHGPPPPLLSGLAMDSHRVGAATAGRLPASGLPGPLPPGKYMAGLNLHPHPGEAFLGSFVASGMGPSASSHGSPVPLPSDLSFRSPTPSNLPMVQLWAAHAHEGFSHLPSGLYPSYLHLNHLEPPSSGSPLLSQLGQPSIFDTQKGQGPGGDGFYLPTAGAPGSLHSHAPSARTPGGGHSSGAPAKGSSSRDGPAKERAGRGGEPPPLFGKKDPRARGEEASGPRGVVDLTQEARAEGRQDRGPPRLAERLSPFLAESKTKNAALQPSVLTMCNGGAGDVGLPALVAEAGRGGAKEAARQDEGARLLRRTETLLPGPRPCPSPLPPPPAPPKGPPAPPAATPAGVYTVFREQGREHRVVAPTFVPSVEAFDERPGPIQIASQARDARAREREAGRPGVLQAPPGSPRPLDRPEGLREKNSVIRSLKRPPPADAPTVRATRASPDPRAYVPAKELLKPEADPRPCERAPRGPAGPAAQQAAKLFGLEPGRPPPTGPEHKWKPFELGNFAATQMAVLAAQHHHSRAEEEAAVVAASSSKKAYLDPGAVLPRSAATCGRPVADMHSAAHGSGEASAMQSLIKYSGSFARDAVAVRPGGCGKKSPFGGLGTMKPEPAPTSAGASRAQARLPHSGGPAAGGGRQLKRDPERPESAKAFGREGSGAQGEAEVRHPPVGIAVAVARQKDSGGSGRLGPGLVDQERSLSLSNVKGHGRADEDCVDDRARHREERLLGARLDRDQEKLLRESKELADLARLHPTSCAPNGLNPNLMVTGGPALAGSGRWSADPAAHLATHPWLPRSGNASMWLAGHPYGLGPPSLHQGMAPAFPPGLGGSLPSAYQFVRDPQSGQLVVIPSDHLPHFAELMERATVPPLWPALYPPGRSPLHHAQQLQLFSQQHFLRQQEFLYLQQQAAQALELQRSAQLVQERLKAQEHRAEMEEKGSKRGLEAAGKAGLATAGPGLLPRKPPGLAAGPAGTYGKAVSPPPSPRASPVAALKAKVIQKLEDVSKPPAYAYPATPSSHPTSPPPASPPPTPGITRKEEAPENVVEKKDLELEKEAPSPFQALFSDIPPRYPFQALPPHYGRPYPFLLQPTAAADADGLAPDVPLPADGPERLALSPEDKPIRLSPSKITEPLREGPEEEPLAEREVKAEVEDMDEGPTELPPLESPLPLPAAEAMATPSPAGGCGGGLLEAQALSATGQSCAEPSECPDFVEGPEPRVDSPGRTEPCTAALDLGVQLTPETLVEAKEEPVEVPVAVPVVEAVPEEGLAQVAPSESQPTLEMSDCDVPAGEGQCPSLEPQEAVPVLGSTCFLEEASSDQFLPSLEDPLAGMNALAAAAELPQARPLPSPGAAGAQALEKLEAAESLVLEQSFLHGITLLSEIAELELERRSQEMGGAERALVARPSLESLLAAGSHMLREVLDGPVVDPLKNLRLPRELKPNKKYSWMRKKEERMYAMKSSLEDMDALELDFRMRLAEVQRQYKEKQRELVKLQRRRDSEDRREEPHRSLARRGPGRPRKRTHAPSALSPPRKRGKSGHSSGKLSSKSLLTSDDYELGAGIRKRHKGSEEEHDALIGMGKARGRNQTWDEHEASSDFISQLKIKKKKMASDQEQLASKLDKALSLTKQDKLKSPFKFSDSAGGKSKTSGGCGRYLTPYDSLLGKNRKALAKGLGLSLKSSREGKHKRAAKTRKMEVGFKARGQPKSAHSPFASEVSSYSYNTDSEEDEEFLKDEWPAQGPSSSKLTPSLLCSMVAKNSKAAGGPKLTKRGLAAPRTLKPKPATSRKQPFCLLLREAEARSSFSDSSEESFDQDESSEEEDEEEELEEEDEASGGGYRLGARERALSPGLEESGLGLLARFAASALPSPTVGPSLSVVQLEAKQKARKKEERQSLLGTEFEYTDSESEVKVRKRSPAGLLRPKKGLGEPGPSLAAPTPGARGPDPSSPDKAKLAVEKGRKARKLRGPKEPGFEAGPEASDDDLWTRRRSERIFLHDASAAAPAPVSTAPATKTSRCAKGGPLSPRKDAGRAKDRKDPRKKKKGKEAGPGAGLPPPRAPALPSEARAPHASSLTAAKRSKAKAKGKEVKKENRGKGGAVSKLMESMAAEEDFEPNQDSSFSEDEHLPRGGAVERPLTPAPRSCIIDKDELKDGLRVLIPMDDKLLYAGHVQTVHSPDIYRVVVEGERGNRPHIYCLEQLLQEAIIDVRPASTRFLPQGTRIAAYWSQQYRCLYPGTVVRGLLDLEDDGDLITVEFDDGDTGRIPLSHIRLLPPDYKIQCAEPSPALLVPSAKRRSRKTSKDTGEGKDGGTAGSEEPGAKARGRGRKPSAKAKGDRAATLEEGNPTDEVPSTPLALEPSSTPGSKKSPPEPVDKRAKAPKARPAPPQPSPAPPAFTSCPAPEPFAELPAPATSLAPAPLITMPATRPKPKKARAAEESGAKGPRRPGEEAELLVKLDHEGVTSPKSKKAKEALLLREDPGAGGWQEPKSLLSLGSYPPAAGSSEPKAPWPKATDGDLAQEPGPGLTFEDSGNPKSPDKAQAEQDGAEESESSSSSSSGSSSSSSSSSSSGSETEGEEEGDKNGDGGCGTGGRNCSAASSRAASPASSSSSSSSSSSSSSSSSSSSSSSSSSSSSSSSSSSSSSSSSSSSSSSSSSSSSSSSSSTTDEDSSCSSDDEAAPAPTAGPSAQAALPTKATKQAGKARPSAHSPGKKTPAPQPQAPPPQPTQPLQPKAQAGAKSRPKKREGVHLPTTKELAKRQRLPSVENRPKIAAFLPARQLWKWFGKPTQRRGMKGKARKLFYKAIVRGKEMIRIGDCAVFLSAGRPNLPYIGRIQSMWESWGNNMVVRVKWFYHPEETSPGKQFHQGQHWDQKSSRSLPAALRVSSQRKDFMERALYQSSHVDENDVQTVSHKCLVVGLEQYEQMLKTKKYQDSEGLYYLAGTYEPTTGMIFSTDGVPVLC

SEQ ID NO: 155 - protein, 2266 aa, Homo sapiens
MMPGETHSAAPGTAADLSRCQGCASLQQNLNEYVEALITLKQKIINTDNLLTEYQKKCDELQFARRENSNLHHQVEEMLQKISPLQKCQEELGSLKAELEEKKSSLKLYQDTHQEYARVKEECLKSDAQKKKLEAKVKKLQEAAVKQTQDFKQLRNEKKILEKEFKKTQERLDEFSKQKNEKELRHIGTQISSDSYGSIDKRKVKLLLKELWLCVNTTHRLPGEGSRCVPEKPAKAITSSRVPGEDGTLPPTQGSPLRTSNVQTCLTKLSMEIKEDFLCQNVEKQSSSGTNCSSDHVFNENGNLEVLVQSHRDGGSTEFVDHDHFFDEDLQAAIDFFKLPPPLLSPVPSPPPMSSPHPGSLPSSFAPETYFGEYTDSSDNDSVQLRNSAECVSEDDTTESQNYFGSLRKNKGSGTWEEKPKSHEAIQALNTWEVNKVTTSGLETFTATLRESSATHSLVGEKHWTTASRSMSDRKRDILHETKTQMEVREMDKSVQTEKTIHKLTRGLCIERLSASPAQEKEAAPGKSELCSSPLGKRPLNELMESEGKTVLSKMMGSPKSEFTKWTRINEITSEPDRITVSGHFHRLSRELEKEKEDTQGFTLGESPESEDDDSGDGMDVAGLDIETSFSSSSTLVALSVGSNPQSSSGLDCGNDTDITTKVFSTEPHHSEHKLQTKTLNTLHLQSEPPECSIGGNNLENSLCALSPELGASNFNDQKSSGIEYTKVVKGLTKIHSLPRSVFMKATKDGQCESQDPRIELTLNKPDFTSLIGSQAALIKSGLGFVKSTSWHHSDLLRKGGEESLRAKSEHEQKTSHQLQKAMPFLQNRGPTPKPDLLRENNNPVEFKTTASVLPNQVSVITKQTRPEKVQSAKLEHLRPHRVEPTLVTENSGNKTGMSTVAKCDGERDDTTQNITEVAAVKSISPEVSASRRKLDFNSPGGSSPVENSDCSTNSRLSFSPENILIQNQDIVREAAVQGDGQKQRQPQATDLDSSGTHGSEMLPATEVTVSGGFSVEETSCGDTGRSGGEALAVANDSTSTPQNANGLWKLKSTTPGGALPECFGTTDTTFSSAFCRKHGETQDTSQSSLPGTLHCYTGIREGGDDTEVESEAFSCSEGSEQQDAPDDSQKNLGDTDAAVAEVRPSLEVGYLTSALQDFNISTFSELDRLSTSEVVMFLESCQLGDYSSGDSVSECSSKGTLSKEMNKELKASEIGEKYRKQPCEEETLGTCEEWIESEEDDYSLKNTSQLTQCSLETLSEVLTKIRQELQTNSEDCNGKDTGSLLLLNVNNNMTTENLKEKSPFRETTGSSSHASEPTPQAAALDTEGSSPISGMPQNENPQSRPEARSDAGRQTDGGEEDLPEPVEPSALCSDSVMEPSIEQSSNCEAETTFQCQIATVTSEVINVLINKDQNLVIEKGDNWTIISGVAVLPHVDQVTLCDIPGDIPISQDQGELEAGCIPVTSAEKSPEASHTGPAFQEAPCGNNLSCPQEDVSSSGQSTNFDKSRLRNRPVKPSIWISSQIYDQNFETQIVASDHTYYNSKLEPSGKNKNRSKISNKDQSNKPVKTSASSRVETHQSEVAQSFSGEKANTKTQRSQTQTILANADTSTPTDCSPDTLSKIRQEVGPPLPPLLAPLIATPPRTSQPLSPLISSSSPSSPASPVGQVSPFRETPVPPAMSPWPEDPRRASPPDPSPSPSAASASERVVPSPLQFCAATPKHALPVPGRLPPCASGHAAVGGPQENSVKILDTMYPELSARARTLNILKGNIQLTRGPPADCKNLPGPASAMIGFKTITSAATAFVKTGSSSGGDCNQDKSRDLGTQQDSSGKRTLSTSTLRSAKRLRLDTGSPEPETRGVTAEGIHKNLPGNLPPAEVATTNEERSCSSPAVSAVSQLPLSPKETVESHDKAIANALKKIAEFSFDLLPVIRSHVYVGNISKKPVMRDQEKEVVYEFSTTKKHLAECLLHSILSELKIQKISMDHNYIHALCRVYVGICRQLGDLERARLFCYSLLKEDFPESEKLTLFIANMWHDIFLSQSVINKAMQLVARQRAKGEVLNCLRAFLNWEKNAPVDVGFMVSKLLLTIQLCPKTEFQPSEKFGEDLSDNTWEYIFAIDLLCCHQKWIWTHDNIISKELWPVMDKWIKYRKGHANIAYTPDIIIASILRLIGRLGQLGLKEGFPSAVKNISSVIGMFIQHAHDEDIPWGIQLAAVYALCDLSPSNPAEISKILEAWRREASKSVPSAIVSCLEEVSALSTEELG

SEQ ID NO: 156 - protein, 5033 aa, Homo sapiens
MGDAEGEDEVQFLRTDDEVVLQCSATVLKEQLKLCLAAEGFGNRLCFLEPTSNAQNVPPDLAICCFVLEQSLSVRALQEMLANTVEAGVESSQGGGHRTLLYGHAILLRHAHSRMYLSCLTTSRSMTDKLAFDVGLQEDATGEACWWTMHPASKQRSEGEKVRVGDDIILVSVSSERYLHLSTASGELQVDASFMQTLWNMNPICSRCEEGFVTGGHVLRLFHGHMDECLTISPADSDDQRRLVYYEGGAVCTHARSLWRLEPLRISWSGSHLRWGQPLRVRHVTTGQYLALTEDQGLVVVDASKAHTKATSFCFRISKEKLDVAPKRDVEGMGPPEIKYGESLCFVQHVASGLWLTYAAPDPKALRLGVLKKKAMLHQEGHMDDALSLTRCQQEESQAARMIHSTNGLYNQFIKSLDSFSGKPRGSGPPAGTALPIEGVILSLQDLIIYFEPPSEDLQHEEKQSKLRSLRNRQSLFQEEGMLSMVLNCIDRLNVYTTAAHFAEFAGEEAAESWKEIVNLLYELLASLIRGNRSNCALFSTNLDWLVSKLDRLEASSGILEVLYCVLIESPEVLNIIQENHIKSIISLLDKHGRNHKVLDVLCSLCVCNGVAVRSNQDLITENLLPGRELLLQTNLINYVTSIRPNIFVGRAEGTTQYSKWYFEVMVDEVTPFLTAQATHLRVGWALTEGYTPYPGAGEGWGGNGVGDDLYSYGFDGLHLWTGHVARPVTSPGQHLLAPEDVISCCLDLSVPSISFRINGCPVQGVFESFNLDGLFFPVVSFSAGVKVRFLLGGRHGEFKFLPPPGYAPCHEAVLPRERLHLEPIKEYRREGPRGPHLVGPSRCLSHTDFVPCPVDTVQIVLPPHLERIREKLAENIHELWALTRIEQGWTYGPVRDDNKRLHPCLVDFHSLPEPERNYNLQMSGETLKTLLALGCHVGMADEKAEDNLKKTKLPKTYMMSNGYKPAPLDLSHVRLTPAQTTLVDRLAENGHNVWARDRVGQGWSYSAVQDIPARRNPRLVPYRLLDEATKRSNRDSLCQAVRTLLGYGYNIEPPDQEPSQVENQSRCDRVRIFRAEKSYTVQSGRWYFEFEAVTTGEMRVGWARPELRPDVELGADELAYVFNGHRGQRWHLGSEPFGRPWQPGDVVGCMIDLTENTIIFTLNGEVLMSDSGSETAFREIEIGDGFLPVCSLGPGQVGHLNLGQDVSSLRFFAICGLQEGFEPFAINMQRPVTTWFSKGLPQFEPVPLEHPHYEVSRVDGTVDTPPCLRLTHRTWGSQNSLVEMLFLRLSLPVQFHQHFRCTAGATPLAPPGLQPPAEDEARAAEPDPDYENLRRSAGGWSEAENGKEGTAKEGAPGGTPQAGGEAQPARAENEKDATTEKNKKRGFLFKAKKVAMMTQPPATPTLPRLPHDVVPADNRDDPEIILNTTTYYYSVRVFAGQEPSCVWAGWVTPDYHQHDMSFDLSKVRVVTVTMGDEQGNVHSSLKCSNCYMVWGGDFVSPGQQGRISHTDLVIGCLVDLATGLMTFTANGKESNTFFQVEPNTKLFPAVFVLPTHQNVIQFELGKQKNIMPLSAAMFQSERKNPAPQCPPRLEMQMLMPVSWSRMPNHFLQVETRRAGERLGWAVQCQEPLTMMALHIPEENRCMDILELSERLDLQRFHSHTLRLYRAVCALGNNRVAHALCSHVDQAQLLHALEDAHLPGPLRAGYYDLLISIHLESACRSRRSMLSEYIVPLTPETRAITLFPPGRSTENGHPRHGLPGVGVTTSLRPPHHFSPPCFVAALPAAGAAEAPARLSPAIPLEALRDKALRMLGEAVRDGGQHARDPVGGSVEFQFVPVLKLVSTLLVMGIFGDEDVKQILKMIEPEVFTEEEEEEDEEEEGEEEDEEEKEEDEEETAQEKEDEEKEEEEAAEGEKEEGLEEGLLQMKLPESVKLQMCHLLEYFCDQELQHRVESLAAFAERYVDKLQANQRSRYGLLIKAFSMTAAETARRTREFRSPPQEQINMLLQFKDGTDEEDCPLPEEIRQDLLDFHQDLLAHCGIQLDGEEEEPEEETTLGSRLMSLLEKVRLVKKKEEKPEEERSAEESKPRSLQELVSHMVVRWAQEDFVQSPELVRAMFSLLHRQYDGLGELLRALPRAYTISPSSVEDTMSLLECLGQIRSLLIVQMGPQEENLMIQSIGNIMNNKVFYQHPNLMRALGMHETVMEVMVNVLGGGESKEIRFPKMVTSCCRFLCYFCRISRQNQRSMFDHLSYLLENSGIGLGMQGSTPLDVAAASVIDNNELALALQEQDLEKVVSYLAGCGLQSCPMLVAKGYPDIGWNPCGGERYLDFLRFAVFVNGESVEENANVVVRLLIRKPECFGPALRGEGGSGLLAAIEEAIRISEDPARDGPGIRRDRRREHFGEEPPEENRVHLGHAIMSFYAALIDLLGRCAPEMHLIQAGKGEALRIRAILRSLVPLEDLVGIISLPLQIPTLGKDGALVQPKMSASFVPDHKASMVLFLDRVYGIENQDFLLHVLDVGFLPDMRAAASLDTATFSTTEMALALNRYLCLAVLPLITKCAPLFAGTEHRAIMVDSMLHTVYRLSRGRSLTKAQRDVIEDCLMSLCRYIRPSMLQHLLRRLVFDVPILNEFAKMPLKLLTNHYERCWKYYCLPTGWANFGVTSEEELHLTRKLFWGIFDSLAHKKYDPELYRMAMPCLCAIAGALPPDYVDASYSSKAEKKATVDAEGNFDPRPVETLNVIIPEKLDSFINKFAEYTHEKWAFDKIQNNWSYGENIDEELKTHPMLRPYKTFSEKDKEIYRWPIKESLKAMIAWEWTIEKAREGEEEKTEKKKTRKISQSAQTYDPREGYNPQPPDLSAVTLSRELQAMAEQLAENYHNTWGRKKKQELEAKGGGTHPLLVPYDTLTAKEKARDREKAQELLKFLQMNGYAVTRGLKDMELDSSSIEKRFAFGFLQQLLRWMDISQEFIAHLEAVVSSGRVEKSPHEQEIKFFAKILLPLINQYFTNHCLYFLSTPAKVLGSGGHASNKEKEMITSLFCKLAALVRHRVSLFGTDAPAVVNCLHILARSLDARTVMKSGPEIVKAGLRSFFESASEDIEKMVENLRLGKVSQARTQVKGVGQNLTYTTVALLPVLTTLFQHIAQHQFGDDVILDDVQVSCYRTLCSIYSLGTTKNTYVEKLRPALGECLARLAAAMPVAFLEPQLNEYNACSVYTTKSPRERAILGLPNSVEEMCPDIPVLERLMADIGGLAESGARYTEMPHVIEITLPMLCSYLPRWWERGPEAPPSALPAGAPPPCTAVTSDHLNSLLGNILRIIVNNLGIDEASWMKRLAVFAQPIVSRARPELLQSHFIPTIGRLRKRAGKVVSEEEQLRLEAKAEAQEGELLVRDEFSVLCRDLYALYPLLIRYVDNNRAQWLTEPNPSAEELFRMVGEIFIYWSKSHNFKREEQNFVVQNEINNMSFLTADNKSKMAKSGGSDQERTKKKRRGDRYSVQTSLIVATLKKMLPIGLNMCAPTDQDLITLAKTRYALKDTDEEVREFLHNNLHLQGKVEGSPSLRWQMALYRGVPGREEDADDPEKIVRRVQEVSAVLYYLDQTEHPYKSKKAVWHKLLSKQRRRAVVACFRMTPLYNLPTHRACNMFLESYKAAWILTEDHSFEDRMIDDLSKAGEQEEEEEEVEEKKPDPLHQLVLHFSRTALTEKSKLDEDYLYMAYADIMAKSCHLEEGGENGEAEEEVEVSFEEKQMEKQRLLYQQARLHTRGAAEMVLQMISACKGETGAMVSSTLKLGISILNGGNAEVQQKMLDYLKDKKEVGFFQSIQALMQTCSVLDLNAFERQNKAEGLGMVNEDGTVINRQNGEKVMADDEFTQDLFRFLQLLCEGHNNDFQNYLRTQTGNTTTINIIICTVDYLLRLQESISDFYWYYSGKDVIEEQGKRNFSKAMSVAKQVFNSLTEYIQGPCTGNQQSLAHSRLWDAVVGFLHVFAHMMMKLAQDSSQIELLKELLDLQKDMVVMLLSLLEGNVVNGMIARQMVDMLVESSSNVEMILKFFDMFLKLKDIVGSEAFQDYVTDPRGLISKKDFQKAMDSQKQFSGPEIQFLLSCSEADENEMINCEEFANRFQEPARDIGFNVAVLLTNLSEHVPHDPRLHNFLELAESILEYFRPYLGRIEIMGASRRIERIYFEISETNRAQWEMPQVKESKRQFIFDVVNEGGEAEKMELFVSFCEDTIFEMQIAAQISEPEGEPETDEDEGAGAAEAGAEGAEEGAAGLEGTAATAAAGATARVVAAAGRALRGLSYRSLRRRVRRLRRLTAREAATAVAALLWAAVTRAGAAGAGAAAGALGLLWGSLFGGGLVEGAKKVTVTELLAGMPDPTSDEVHGEQPAGPGGDADGEGASEGAGDAAEGAGDEEEAVHEAGPGGADGAVAVTDGGPFRPEGAGGLGDMGDTTPAEPPTPEGSPILKRKLGVDGVEEELPPEPEPEPEPELEPEKADAENGEKEEVPEPTPEPPKKQAPPSPPPKKEEAGGEFWGELEVQRVKFLNYLSRNFYTLRFLALFLAFAINFILLFYKVSDSPPGEDDMEGSAAGDVSGAGSGGSSGWGLGAGEEAEGDEDENMVYYFLEESTGYMEPALRCLSLLHTLVAFLCIIGYNCLKVPLVIFKREKELARKLEFDGLYITEQPEDDDVKGQWDRLVLNTPSFPSNYWDKFVKRKVLDKHGDIYGRERIAELLGMDLATLEITAHNERKPNPPPGLLTWLMSIDVKYQIWKFGVIFTDNSFLYLGWYMVMSLLGHYNNFFFAAHLLDIAMGVKTLRTILSSVTHNGKQLVMTVGLLAVVVYLYTVVAFNFFRKFYNKSEDEDEPDMKCDDMMTCYLFHMYVGVRAGGGIGDEIEDPAGDEYELYRVVFDITFFFFVIVILLAIIQGLIIDAFGELRDQQEQVKEDMETKCFICGIGSDYFDTTPHGFETHTLEEHNLANYMFFLMYLINKDETEHTGQESYVWKMYQERCWDFFPAGDCFRKQYEDQLS

SEQ ID NO: 157 - protein, 4388 aa, Homo sapiens
MLEGLVAWVLNTYLGKYVNNLNTDQLSVALLKGAVELENLPLKKDALKELELPFEVKAGFIGKVTLQIPFYRPHVDPWVISISSLHLIGAPEKIQDFNDEKEKLLERERKKALLQALEEKWKNDRQQKGESYWYSVTASVVTRIVENIELKIQDVHLRFEDGVTNPSHPFAFGICIKNVSMQNAVNEPVQKLMRKKQLDVAEFSIYWDVDCTLLGDLPQMELQEAMARSMESRSHHYVLEPVFASALLKRNCSKKPLRSRHSPRIDCDIQLETIPLKLSQLQYRQIMEFLKELERKERQVKFRRWKPKVAISKNCREWWYFALNANLYEIREQRKRCTWDFMLHRARDAVSYTDKYFNKLKGGLLSTDDKEEMCRIEEEQSFEELKILRELVHDRFHKQEELAESLREPQFDSPGACPGAPEPGGGSGMLQYLQSWFPGWGGWYGQQTPEGNVVEGLSAEQQEQWIPEEILGTEEFFDPTADASCMNTYTKRDHVFAKLNLQLQRGTVTLLHKEQGTPQMNESAFMQLEFSDVKLLAESLPRRNSSLLSVRLGGLFLRDLATEGTMFPLLVFPNPQKEVGRVSQSFGLQTTSADRSDHYPAADPDGPVFEMLYERNPAHSHFERRLNVSTRPLNIIYNPQAIKKVADFFYKGKVHTSGFGYQSELELRVAEAARRQYNKLKMQTKAEIRQTLDRLLVGDFIEESKRWTVRLDISAPQVIFPDDFKFKNPVLVVVDLGRMLLTNTQDNSRRKSRDGSASEETQFSDDEYKTPLATPPNTPPPESSSSNGEKTPPFSGVEFSEEQLQAHLMSTKMYERYSLSFMDLQIMVGRVKDNWKHVQDIDVGPTHVVEKFNVHLQLERRLIYTSDPKYPGAVLSGNLPDLKIHINEDKISALKNCFALLTTPEMKTSDTQIKEKIFPQEEQRGSLQDSVMNLTQSIVLLEQHTREVLVESQLLLAEFKVNCMQLGVESNGRYISVLKVFGTNAHFVKRPYDAEVSLTVHGLLLVDTMQTYGADFDLLMASHKNLSFDIPTGSLRDSRAQSPVSGPNVAHLTDGATLNDRSATSVSLDKILTKEQESLIKLEYQFVSSECPSMNLDSTLQVISLQVNNLDIILNPETIVELIGFLQKSFPKEKDDLSPQPLMTDFERSFREQGTYQSTYEQNTEVAVEIHRLNLLLLRTVGMANREKYGRKIATASIGGTKVNVSMGSTFDMNGSLGCLQLMDLTQDNVKNQYVVSIGNSVGYENIISDIGYFESVFVRMEDAALTEALSFTFVERSKQECFLNLKMASLHYNHSAKFLKELTLSMDELEENFRGMLKSAATKVTTVLATKTAEYSEMVSLFETPRKTREPFILEENEIYGFDLASSHLDTVKLILNINIESPVVSIPRKPGSPELLVGHLGQIFIQNFVAGDDESRSDRLQVEIKDIKLYSLNCTQLAGREAVGSEGSRMFCPPSGSGSANSQEEAHFTRHDFFESLHRGQAFHILNNTTIQFKLEKIPIERESELTFSLSPDDLGTSSIMKIEGKFVNPVQVVLAKHVYEQVLQTLDNLVYSEDLNKYPASATSSPCPDSPLPPLSTCGESSVERKENGLFSHSSLSNTSQKSLSVKEVKSFTQIQATFCISELQVQLSGDLTLGAQGLVSLKFQDFEVEFSKDHPQTLSIQIALHSLLMEDLLEKNPDSKYKNLMVSRGAPKPSSLAQKEYLSQSCPSVSNVEYPDMPRSLPSHMEEAPNVFQLYQRPTSASRKKQKEVQDKDYPLTPPPSPTVDEPKILVGKSKFDDSLVHINIFLVDKKHPEFSSSYNRVNRSIDVDFNCLDVLITLQTWVVILDFFGIGSTADNHAMRLPPEGILHNVKLEPHASMESGLQDPVNTKLDLKVHSLSLVLNKTTSELAKANVSKLVAHLEMIEGDLALQGSIGSLSLSDLTCHGEFYRERFTTSGEEALIFQTFKYGRPDPLLRREHDIRVSLRMASVQYVHTQRFQAEVVAFIQHFTQLQDVLGRQRAAIEGQTVRDQAQRCSRVLLDIEAGAPVLLIPESSRSNNLIVANLGKLKVKNKFLFAGFPGTFSLQDKESVPSASPTGIPKHSLRKTTSTEEPRGTHSQGQFTMPLAGMSLGSLKSEFVPSTSTKQQGPQPTLSVGQESSSPEDHVCLLDCVVVDLQDMDIFAAERHPREYSKAPEDSSGDLIFPSYFVRQTGGSLLTEPCRLKLQVERNLDKEISHTVPDISIHGNLSSVHCSLDLYKYKLIRGLLENNLGEPIEEFMRPYDLQDPRIHTVLSGEVYTCMCFLIDMVNVSLELKDPKRKEGAGSLARFDFKKCKLLYESFSNQTKSINLVSHSMMAFDTRYAGQKTSPGMTNVFSCIFQPAKNSSTTQGSIQIELHFRSTKDSSCFTVVLNNLRVFLIFDWLLLVHDFLHTPSDIKKQNHVTPSRHRNSSSESAIVPKTVKSGVVTKRSSLPVSNERHLEVKVNVTGTEFVVIEDVSCFDTNAIILKGTTVLTYKPRFVDRPFSGSLFGIEVFSCRLGNEHDTALSIVDPVQIQMELVGNSSYQNSSGLMDAFNSEDFPPVLEIQLQALDIRLSYNDVQLFLAIAKSIPEQANAAVPDSVALESDSVGTYLPGASRVGEEIREGTRHTLDPVLELQLARLQELGFSMDDCRKALLACQGQLKKAASWLFKNAEPLKSLSLASTSRDSPGAVAAPLISGVEIKAESVCICFIDDCMDCDVPLAELTFSRLNFLQRVRTSPEGYAHFTLSGDYYNRALSGWEPFIEPWPCSVSWQQQAASRLHPPRLKLEAKAKPRLDINITSVLIDQYVSTKESWMADYCKDDKDIESAKSEDWMGSSVDPPCFGQSLPLVYLRTRSTASLTNLEHQIYARAEVKTPKRRQPFVPFALRNHTGCTLWFATLTTTPTRAALSHSGSPGVVPEGNGTFLDDTHNVSEWREVLTGEEIPFEFEARGKLRHRHTHDLRIHQLQVRVNGWEQVSPVSVDKVGTFFRYAAPDKNSSSSTIGSPSSRTNIIHPQVYFSSLPPVRVVFAVTMEGSARKVITVRSALIVRNRLETPMELRLDSPSAPDKPVVLPAIMPGDSFAVPLHLTSWRLQARPKGLGVFFCKAPIHWTNVVKTAEISSSKRECHSMDTEKSRFFRFCVAIKKENYPDYMPSNIFSDSAKQIFRQPGHTIYLLPTVVICNLLPCELDFYVKGMPINGTLKPGKEAALHTADTSQNIELGVSLENFPLCKELLIPPGTQNYMVRMRLYDVNRRQLNLTIRIVCRAEGSLKIFISAPYWLINKTGLPLIFRQDNAKTDAAGQFEEHELARSLSPLLFCYADKEQPNLCTMRIGRGIHPEGMPGWCQGFSLDGGSGVRALKVIQQGNRPGLIYNIGIDVKKGRGRYIDTCMVIFAPRYLLDNKSSHKLAFAQREFARGQGTANPEGYISTLPGSSVVFHWPRNDYDQLLCVRLMDVPNCIWSGGFEVNKNNSFHINMRDTLGKCFFLRVEITLRGATYRISFSDTDQLPPPFRIDNFSKVPVVFTQHGVAEPRLRTEVKPMTSLDYAWDEPTLPPFITLTVKGAGSSEINCNMNDFQDNRQLYYENFIYIAATYTFSGLQEGTGRPVASNKAITCAELVLDVSPKTQRVILKKKEPGKRSQLWRMTGTGMLAHEGSSVPHNPNKPSAARSTEGSAILDIAGLAAVTDNRYEPLMLRKPDRRRSTTQTWSFREGKLTCGLHGLVVQAKGGLSGLFDGAEVVLGPDTSMELLGPVPPEQQFINQKMRPGSGMLSIRVIPDGPTRALQITDFCHRKSSRSYEVDELPVTEQELQKLKNPDTEQELEVLVRLEGGIGLSLINKVPEELVFASLTGINVHYTQLATSHMLELSIQDVQVDNQLIGTTQPFMLYVTPLSNENEVIETGPAVQVNAVKFPSKSALTNIYKHLMITAQRFTVQIEEKLLLKLLSFFGYDQAESEVEKYDENLHEKTAEQGGTPIRYYFENLKISIPQIKLSVFTSNKLPLDLKALKSTLGFPLIRFEDAVINLDPFTRVHPYETKEFIINDILKHFQEELLSQAARILGSVDFLGNPMGLLNDVSEGVTGLIKYGNVGGLIRNVTHGVSNSAAKFAGTLSDGLGKTMDNRHQSEREYIRYHAATSGEHLVAGIHGLAHGIIGGLTSVITSTVEGVKTEGGVSGFISGLGKGLVGTVTKPVAGALDFASETAQAVRDTATLSGPRTQAQRVRKPRCCTGPQGLLPRYSESQAEGQEQLFKLTDNIQDEFFIAVENIDSYCVLISSKAVYFLKSGDYVDREAIFLEVKYDDLYHCLVSKDHGKVYVQVTKKAVSTSSGVSIPGPSHQKPMVHVKSEVLAVKLSQEINYAKSLYYEQQLMLRLSENREQLELDS

SEQ ID NO: 158 - protein, 408 aa, Homo sapiens
MTSKGPEEEHPSVTLFRQYLRIRTVQPKPDYGAAVAFFEETARQLGLGCQKVEVAPGYVVTVLTWPGTNPTLSSILLNSHTDVVPVFKEHWSHDPFEAFKDSEGYIYARGAQDMKCVSIQYLEAVRRLKVEGHRFPRTIHMTFVPDEEVGGHQGMELFVQRPEFHALRAGFALDEGIANPTDAFTVFYSERSPWWVRVTSTGRPGHASRFMEDTAAEKLHKVVNSILAFREKEWQRLQSNPHLKEGSVTSVNLTKLEGGVAYNVIPATMSASFDFRVAPDVDFKAFEEQLQSWCQAAGEGVTLEFAQKWMHPQVTPTDDSNPWWAAFSRVCKDMNLTLEPEIMPAATDNRYIRAVGVPALGFSPMNRTPVLLHDHDERLHEAVFLRGVDIYTRLLPALASVPALPSDS

SEQ ID NO: 159 - protein, 114 aa, Homo sapiens
DIVMTQSPDSLAVSLGERATINCKSSQSVLYSSNSKNYLAWYQQKPGQPPKLLIYWASTRESGVPDRFSGSGSGTDFTLTISSLQAEDVAVYYCQQYYSTPYSFGQGTKLEIKR

SEQ ID NO: 160 - protein, 2920 aa, Homo sapiens
MRGRRGRPPKQPAAPAAERCAPAPPPPPPPPTSGPIGGLRSRHRGSSRGRWAAAQAEVAPKTRLSSPRGGSSSRRKPPPPPPAPPSTSAPGRGGRGGGGGRTGGGGGGGHLARTTAARRAVNKVVYDDHESEEEEEEEDMVSEEEEEEDGDAEETQDSEDDEEDEMEEDDDDSDYPEEMEDDDDDASYCTESSFRSHSTYSSTPGRRKPRVHRPRSPILEEKDIPPLEFPKSSEDLMVPNEHIMNVIAIYEVLRNFGTVLRLSPFRFEDFCAALVSQEQCTLMAEMHVVLLKAVLREEDTSNTTFGPADLKDSVNSTLYFIDGMTWPEVLRVYCESDKEYHHVLPYQEAEDYPYGPVENKIKVLQFLVDQFLTTNIAREELMSEGVIQYDDHCRVCHKLGDLLCCETCSAVYHLECVKPPLEEVPEDEWQCEVCVAHKVPGVTDCVAEIQKNKPYIRHEPIGYDRSRRKYWFLNRRLIIEEDTENENEKKIWYYSTKVQLAELIDCLDKDYWEAELCKILEEMREEIHRHMDITEDLTNKARGSNKSFLAAANEEILESIRAKKGDIDNVKSPEETEKDKNETENDSKDAEKNREEFEDQSLEKDSDDKTPDDDPEQGKSEVGDFKSEKSNGELSESPGAGKGASGSTRIITRLRNPDSKLSQLKSQQVAAAAHEANKLFKEGKEVLVVNSQGEISRLSTKKEVIMKGNINNYFKLGQEGKYRVYHNQYSTNSFALNKHQHREDHDKRRHLAHKFCLTPAGEFKWNGSVHGSKVLTISTLRLTITQLENNIPSSFLHPNWASHRANWIKAVQMCSKPREFALALAILECAVKPVVMLPIWRESLGHTRLHRMTSIEREEKEKVKKKEKKQEEEETMQQATWVKYTFPVKHQVWKQKGEEYRVTGYGGWSWISKTHVYRFVPKLPGNTNVNYRKSLEGTKNNMDENMDESDKRKCSRSPKKIKIEPDSEKDEVKGSDAAKGADQNEMDISKITEKKDQDVKELLDSDSDKPCKEEPMEVDDDMKTESHVNCQESSQVDVVNVSEGFHLRTSYKKKTKSSKLDGLLERRIKQFTLEEKQRLEKIKLEGGIKGIGKTSTNSSKNLSESPVITKAKEGCQSDSMRQEQSPNANNDQPEDLIQGCSESDSSVLRMSDPSHTTNKLYPKDRVLDDVSIRSPETKCPKQNSIENDIEEKVSDLASRGQEPSKSKTKGNDFFIDDSKLASADDIGTLICKNKKPLIQEESDTIVSSSKSALHSSVPKSTNDRDATPLSRAMDFEGKLGCDSESNSTLENSSDTVSIQDSSEEDMIVQNSNESISEQFRTREQDVEVLEPLKCELVSGESTGNCEDRLPVKGTEANGKKPSQQKKLEERPVNKCSDQIKLKNTTDKKNNENRESEKKGQRTSTFQINGKDNKPKIYLKGECLKEISESRVVSGNVEPKVNNINKIIPENDIKSLTVKESAIRPFINGDVIMEDFNERNSSETKSHLLSSSDAEGNYRDSLETLPSTKESDSTQTTTPSASCPESNSVNQVEDMEIETSEVKKVTSSPITSEEESNLSNDFIDENGLPINKNENVNGESKRKTVITEVTTMTSTVATESKTVIKVEKGDKQTVVSSTENCAKSTVTTTTTTVTKLSTPSTGGSVDIISVKEQSKTVVTTTVTDSLTTTGGTLVTSMTVSKEYSTRDKVKLMKFSRPKKTRSGTALPSYRKFVTKSSKKSIFVLPNDDLKKLARKGGIREVPYFNYNAKPALDIWPYPSPRPTFGITWRYRLQTVKSLAGVSLMLRLLWASLRWDDMAAKAPPGGGTTRTETSETEITTTEIIKRRDVGPYGIRSEYCIRKIICPIGVPETPKETPTPQRKGLRSSALRPKRPETPKQTGPVIIETWVAEEELELWEIRAFAERVEKEKAQAVEQQAKKRLEQQKPTVIATSTTSPTSSTTSTISPAQKVMVAPISGSVTTGTKMVLTTKVGSPATVTFQQNKNFHQTFATWVKQGQSNSGVVQVQQKVLGIIPSSTGTSQQTFTSFQPRTATVTIRPNTSGSGGTTSNSQVITGPQIRPGMTVIRTPLQQSTLGKAIIRTPVMVQPGAPQQVMTQIIRGQPVSTAVSAPNTVSSTPGQKSLTSATSTSNIQSSASQPPRPQQGQVKLTMAQLTQLTQGHGGNQGLTVVIQGQGQTTGQLQLIPQGVTVLPGPGQQLMQAAMPNGTVQRFLFTPLATTATTASTTTTTVSTTAAGTGEQRQSKLSPQMQVHQDKTLPPAQSSSVGPAEAQPQTAQPSAQPQPQTQPQSPAQPEVQTQPEVQTQTTVSSHVPSEAQPTHAQSSKPQVAAQSQPQSNVQGQSPVRVQSPSQTRIRPSTPSQLSPGQQSQVQTTTSQPIPIQPHTSLQIPSQGQPQSQPQVQSSTQTLSSGQTLNQVTVSSPSRPQLQIQQPQPQVIAVPQLQQQVQVLSQIQSQVVAQIQAQQSGVPQQIKLQLPIQIQQSSAVQTHQIQNVVTVQAASVQEQLQRVQQLRDQQQKKKQQQIEIKREHTLQASNQSEIIQKQVVMKHNAVIEHLKQKKSMTPAEREENQRMIVCNQVMKYILDKIDKEEKQAAKKRKREESVEQKRSKQNATKLSALLFKHKEQLRAEILKKRALLDKDLQIEVQEELKRDLKIKKEKDLMQLAQATAVAAPCPPVTPAPPAPPAPPPSPPPPPAVQHTGLLSTPTLPAASQKRKREEEKDSSSKSKKKKMISTTSKETKKDTKLYCICKTPYDESKFYIGCDRCQNWYHGRCVGILQSEAELIDEYVCPQCQSTEDAMTVLTPLTEKDYEGLKRVLRSLQAHKMAWPFLEPVDPNDAPDYYGVIKEPMDLATMEERVQRRYYEKLTEFVADMTKIFDNCRYYNPSDSPFYQCAEVLESFFVQKLKGFKASRSHNNKLQSTAS

SEQ ID NO: 161 - protein, 3036 aa, Homo sapiens
MHLHQVLTGAVNPGDNCYSVGSVGDVPFTAYGSGCDIVILANDFECVQIIPGAKHGNIQVSCVECSNQQGRIAASYGNAVCIFEPLGINSHKRNCQLKCQWLKTGQFFLSSVTYNLAWDPQDNRLLTATDSIQLWAPPGDDILEEEEEIDNTVPPVLNDWKCVWQCKTSVSVHLMEWSPDGEYFATAGKDDCLLKVWYPMTGWKSSIIPQDHHEVKRRQSSTQFSFVYLAHPRAVTGFSWRKTSKYMPRGSVCNVLLTSCHDGVCRLWAETLLPEDCLLGEQICETTTSSIASSLSHAGRHKDRIQHALETIHHLKNLRKGQRRSSVLVTHAELMPDQTAMHEVQRHISHHANALCHFHIAASINPATDIPNVLVGTAFNVDDGNGGFVVHWLNNKEFHFTSSTEVFMHQLRKLSDKQVDHENDDADREDEEHSQEDRERGLHMKLDHDLSLDRESEAGTGSSEHEDGEREGSPRTYSRLSVPMPLPTVLLDRKIETLLTEWNKNPDMLFTIHPVDGTFLVWHVKYLDEYNPGIFRQVQVSFSSRIPVAFPSGDASSLSKNIMMYACINATKDSHHTLLHQEGMSVGSPHGSQPHSRSHSTHMNILAPTVMMISKHIDGSLNQWAVTFADKSAFTTVLTVSHKFRYCGHRFHLNDLACHSVLPLLLTSSHHNALLTPELDCQWDSDNKLSRLMDPVKHIKGSSKQPLRNAATRTFHDPNAIYSELILWRVDPIGPLSYTGGVSELARINSLHTSAFSNVAWLPTLIPSYCLGTYCNSASACFVASDGKNLRLYQAVVDARKLLDELSDPESSKLIGEVFNIVSQQSTARPGCIIELDAITNQCGSNTQLLHVFQEDFIIGYKPHKEDMEKKETEIFFQPSQGYRPPPFSEKFFLVVIEKDSNNNSILHMWHLHLKSVQACLAKASEGASSESLLSVPGQKNVDSSPETSPSVSPMPHSSSIANLQTASKLILSSRLVYSQPLDLPESVEVIRATPSAGHLSSSSIYPVCLAPYLVVTTCSDNKVRFWKCCMEANPECNKSDEKEIYHWKRWPLMNDEGEDNSSTVSIVGRPVAVSCSYTGRLAVAYKQPIHHNGFVSKEFSMHVCIFECESTGGSEWVLEQTIHLDDLVKVGSVLDSRVSVDSNLFVYSKSDALLSKDRYLIPNIKHLVHLDWVSKEDGSHILTVGVGANIFMYGRLSGIVTEQTNSKDGVAVITLPLGGSIKQGVKSRWVLLRSIDLVSSVDGTPSLPVSLSWVRDGILVVGMDCEMHVYAQWKHAVKFGDTEADSSNAEEAAMQDHSTFKSNMLARKSVVEGTAISDDVFCSPTVIQDGGLFEAAHVLSPTLPQYHPTQLLELMDLGKVRRAKAILSHLVKCIAGEVAIVRDPDAGEGTKRHLSRTISVSGSTAKETVTVGKDGTRDYTEIDSIPPLPLYALLAADQDTSYRISEESTKIPQSYEDQTVSQPEDQYSELFQIQDIPTDDIDLEPEKRENKSKVINLSQYGPAYFGQEHARVLSSHLMHSSLPGLTRLEQMFLVALADTVATTSTELDESRDKSCSGRDTLDECGLRYLLAMRLHTCLLTSLPPLYRVQLLHQGVSTCHFAWAFHSEAEEELINMIPAIQRGDPQWSELRAMGIGWWVRNINTLRRCIEKVAKASFQRNNDALDAALFYLSMKKKAVVWGLFRSQHDEKMTTFFSHNFNEDRWRKAALKNAFSLLGKQRFEQSAAFFLLAGSLKDAIEVCLEKMEDIQLAMVIARLYESEFETSSTYISILNQKILGCQKDGSGFSCKRLHPDPFLRSLAYWVMKDYTRALDTLLEQTPKEDDEHQVIIKSCNPVAFSFYNYLRTHPLLIRRNLASPEGTLATLGLKTEKNFVDKINLIERKLFFTTANAHFKVGCPVLALEVLSKIPKVTKTSALSAKKDQPDFISHRMDDVPSHSKALSDGNGSSGIEWSNVTSSQYDWSQPIVKVDEEPLNLDWGEDHDSALDEEEDDAVGLVMKSTDAREKDKQSDQKASDPNMLLTPQEEDDPEGDTEVDVIAEQLKFRACLKILMTELRTLATGYEVDGGKLRFQLYNWLEKEIAALHEICNHESVIKEYSSKTYSKVESDLLDQEEMVDKPDIGSYERHQIERRRLQAKREHAERRKSWLQKNQDLLRVFLSYCSLHGAQGGGLASVRMELKFLLQESQQETTVKQLQSPLPLPTTLPLLSASIASTKTVIANPVLYLNNHIHDILYTIVQMKTPPHPSIEDVKVHTLHSLAASLSASIYQALCDSHSYSQTEGNQFTGMAYQGLLLSDRRRLRTESIEEHATPNSSPAQWPGVSSLINLLSSAQDEDQPKLNILLCEAVVAVYLSLLIHALATNSSSELFRLAAHPLNNRMWAAVFGGGVKLVVKPRRQSENISAPPVLSEDIDKHRRRFNMRMLVPGRPVKDATPPPVPAERPSYKEKFIPPELSMWDYFVAKPFLPLSDSGVIYDSDESIHSDEEDDAFFSDTQIQEHQDPNSYSWALLHLTMVKLALHNVKNFFPIAGLEFSELPVTSPLGIAVIKNLENWEQILQEKMDQFEGPPPNYINTYPTDLSVGAGPAILRNKAMLEPENTPFKSRDSSAFPVKRLWHFLVKQEVLQETFIRYIFTKKRKQSEVEADLGYPGGKAKVIHKESDMIMAFSVNKANCNEIVLASTHDVQELDVTSLLACQSYIWIGEEYDRESKSSDDVDYRGSTTTLYQPSATSYSASQVHPPSSLPWLGTGQTSTGASVLMKRNLHNVKRMTSHPVHQYYLTGAQDGSVRMFEWTRPQQLVCFRQAGNARVTRLYFNSQGNKCGVADGEGFLSIWQVNQTASNPKPYMSWQCHSKATSDFAFITSSSLVATSGHSNDNRNVCLWDTLISPGNSLIHGFTCHDHGATVLQYAPKQQLLISGGRKGHVCIFDIRQRQLIHTFQAHDSAIKALALDPYEEYFTTGSAEGNIKVWRLTGHGLIHSFKSEHAKQSIFRNIGAGVMQIDIIQGNRLFSCGADGTLKTRVLPNAFNIPNRILDIL

SEQ ID NO: 162 - protein, 3063 aa, Homo sapiens
MRSRLPPALAALGAALLLSSIEAEVDPPSDLNFKIIDENTVHMSWAKPVDPIVGYRITVDPTTDGPTKEFTLSASTTETLLSELVPETEYVVTITSYDEVEESVPVIGQLTIQTGSSTKPVEKKPGKTEIQKCSVSAWTDLVFLVDGSWSVGRNNFKYILDFIAALVSAFDIGEEKTRVGVVQYSSDTRTEFNLNQYYQRDELLAAIKKIPYKGGNTMTGDAIDYLVKNTFTESAGARVGFPKVAIIITDGKSQDEVEIPARELRNVGVEVFSLGIKAADAKELKQIASTPSLNHVFNVANFDAIVDIQNEIISQVCSGVDEQLGELVSGEEVVEPPSNLIAMEVSSKYVKLNWNPSPSPVTGYKVILTPMTAGSRQHALSVGPQTTTLSVRDLSADTEYQISVSAMKGMTSSEPISIMEKTQPMKVQVECSRGVDIKADIVFLVDGSYSIGIANFVKVRAFLEVLVKSFEISPNRVQISLVQYSRDPHTEFTLKKFTKVEDIIEAINTFPYRGGSTNTGKAMTYVREKIFVPSKGSRSNVPKVMILITDGKSSDAFRDPAIKLRNSDVEIFAVGVKDAVRSELEAIASPPAETHVFTVEDFDAFQRISFELTQSICLRIEQELAAIKKKAYVPPKDLSFSEVTSYGFKTNWSPAGENVFSYHITYKEAAGDDEVTVVEPASSTSVVLSSLKPETLYLVNVTAEYEDGFSIPLAGEETTEEVKGAPRNLKVTDETTDSFKITWTQAPGRVLRYRIIYRPVAGGESREVTTPPNQRRRTLENLIPDTKYEVSVIPEYFSGPGTPLTGNAATEEVRGNPRDLRVSDPTTSTMKLSWSGAPGKVKQYLVTYTPVAGGETQEVTVRGDTTNTVLQGLKEGTQYALSVTALYASGAGDALFGEGTTLEERGSPQDLVTKDITDTSIGAYWTSAPGMVRGYRVSWKSLYDDVDTGEKNLPEDAIHTMIENLQPETKYRISVFATYSSGEGEPLTGDATTELSQDSKTLKVDEETENTMRVTWKPAPGKVVNYRVVYRPHGRGKQMVAKVPPTVTSTVLKRLQPQTTYDITVLPIYKMGEGKLRQGSGTTASRFKSPRNLKTSDPTMSSFRVTWEPAPGEVKGYKVTFHPTGDDRRLGELVVGPYDNTVVLEELRAGTTYKVNVFGMFDGGESSPLVGQEMTTLSDTTVMPILSSGMECLTRAEADIVLLVDGSWSIGRANFRTVRSFISRIVEVFDIGPKRVQIALAQYSGDPRTEWQLNAHRDKKSLLQAVANLPYKGGNTLTGMALNFIRQQNFRTQAGMRPRARKIGVLITDGKSQDDVEAPSKKLKDEGVELFAIGIKNADEVELKMIATDPDDTHAYNVADFESLSRIVDDLTINLCNSVKGPGDLEAPSNLVISERTHRSFRVSWTPPSDSVDRYKVEYYPVSGGKRQEFYVSRMETSTVLKDLKPETEYVVNVYSVVEDEYSEPLKGTEKTLPVPVVSLNIYDVGPTTMHVQWQPVGGATGYILSYKPVKDTEPTRPKEVRLGPTVNDMQLTDLVPNTEYAVTVQAVLHDLTSEPVTVREVTLPLPRPQDLKLRDVTHSTMNVFWEPVPGKVRKYIVRYKTPEEDVKEVEVDRSETSTSLKDLFSQTLYTVSVSAVHDEGESPPVTAQETTRPVPAPTNLKITEVTSEGFRGTWDHGASDVSLYRITWAPFGSSDKMETILNGDENTLVFENLNPNTIYEVSITAIYPDESESDDLIGSERTLPILTTQAPKSGPRNLQVYNATSNSLTVKWDPASGRVQKYRITYQPSTGEGNEQTTTIGGRQNSVVLQKLKPDTPYTITVSSLYPDGEGGRMTGRGKTKPLNTVRNLRVYDPSTSTLNVRWDHAEGNPRQYKLFYAPAAGGPEELVPIPGNTNYAILRNLQPDTSYTVTVVPVYTEGDGGRTSDTGRTLMRGLARNVQVYNPTPNSLDVRWDPAPGPVLQYRVVYSPVDGTRPSESIVVPGNTRMVHLERLIPDTLYSVNLVALYSDGEGNPSPAQGRTLPRSGPRNLRVFGETTNSLSVAWDHADGPVQQYRIIYSPTVGDPIDEYTTVPGRRNNVILQPLQPDTPYKITVIAVYEDGDGGHLTGNGRTVGLLPPQNIHISDEWYTRFRVSWDPSPSPVLGYKIVYKPVGSNEPMEAFVGEMTSYTLHNLNPSTTYDVNVYAQYDSGLSVPLTDQGTTLYLNVTDLKTYQIGWDTFCVKWSPHRAATSYRLKLSPADGTRGQEITVRGSETSHCFTGLSPDTDYGVTVFVQTPNLEGPGVSVKEHTTVKPTEAPTEPPTPPPPPTIPPARDVCKGAKADIVFLTDASWSIGDDNFNKVVKFIFNTVGGFDEISPAGIQVSFVQYSDEVKSEFKLNTYNDKALALGALQNIRYRGGNTRTGKALTFIKEKVLTWESGMRKNVPKVLVVVTDGRSQDEVKKAALVIQQSGFSVFVVGVADVDYNELANIASKPSERHVFIVDDFESFEKIEDNLITFVCETATSSCPLIYLDGYTSPGFKMLEAYNLTEKNFASVQGVSLESGSFPSYSAYRIQKNAFVNQPTADLHPNGLPPSYTIILLFRLLPETPSDPFAIWQITDRDYKPQVGVIADPSSKTLSFFNKDTRGEVQTVTFDTEEVKTLFYGSFHKVHIVVTSKSVKIYIDCYEIIEKDIKEAGNITTDGYEILGKLLKGERKSAAFQIQSFDIVCSPVWTSRDRCCDIPSRRDEGKCPAFPNSCTCTQDSVGPPGPPGPAGGPGAKGPRGERGISGAIGPPGPRGDIGPPGPQGPPGPQGPNGLSIPGEQGRQGMKGDAGEPGLPGRTGTPGLPGPPGPMGPPGDRGFTGKDGAMGPRGPPGPPGSPGSPGVTGPSGKPGKPGDHGRPGPSGLKGEKGDRGDIASQNMMRAVARQVCEQLISGQMNRFNQMLNQIPNDYQSSRNQPGPPGPPGPPGSAGARGEPGPGGRPGFPGTPGMQGPPGERGLPGEKGERGTGSSGPRGLPGPPGPQGESRTGPPGSTGSRGPPGPPGRPGNSGIRGPPGPPGYCDSSQCASIPYNGQGYPGSG

SEQ ID NO: 163 - protein, 3664 aa, Homo sapiens
MVRETRHLWVGNLPENVREEKIIEHFKRYGRVESVKILPKRGSEGGVAAFVDFVDIKSAQKAHNSVNKMGDRDLRTDYNEPGTIPSAARGLDDTVSIASRSREVSGFRGGGGGPAYGPPPSLHAREGRYERRLDGASDNRERAYEHSAYGHHERGTGGFDRTRHYDQDYYRDPRERTLQHGLYYASRSRSPNRFDAHDPRYEPRAREQFTLPSVVHRDIYRDDITREVRGRRPERNYQHSRSRSPHSSQSRNQSPQRLASQASRPTRSPSGSGSRSRSSSSDSISSSSSTSSDSSDSSSSSSDDSPARSVQSAAVPAPTSQLLSSLEKDEPRKSFGIKVQNLPVRSTDTSLKDGLFHEFKKFGKVTSVQIHGTSEERYGLVFFRQQEDQEKALTASKGKLFFGMQIEVTAWIGPETESENEFRPLDERIDEFHPKATRTLFIGNLEKTTTYHDLRNIFQRFGEIVDIDIKKVNGVPQYAFLQYCDIASVCKAIKKMDGEYLGNNRLKLGFGKSMPTNCVWLDGLSSNVSDQYLTRHFCRYGPVVKVVFDRLKGMALVLYNEIEYAQAAVKETKGRKIGGNKIKVDFANRESQLAFYHCMEKSGQDIRDFYEMLAERREERRASYDYNQDRTYYESVRTPGTYPEDSRRDYPARGREFYSEWETYQGDYYESRYYDDPREYRDYRNDPYEQDIREYSYRQRERERERERFESDRDRDHERRPIERSQSPVHLRRPQSPGASPSQAERLPSDSERRLYSRSSDRSGSCSSLSPPRYEKLDKSRLERYTKNEKTDKERTFDPERVERERRLIRKEKVEKDKTDKQKRKGKVHSPSSQSSETDQENEREQSPEKPRSCNKLSREKADKEGIAKNRLELMPCVVLTRVKEKEGKVIDHTPVEKLKAKLDNDTVKSSALDQKLQVSQTEPAKSDLSKLESVRMKVPKEKGLSSHVEVVEKEGRLKARKHLKPEQPADGVSAVDLEKLEARKRRFADSNLKAEKQKPEVKKSSPEMEDARVLSKKQPDVSSREVILLREGEAERKPVRKEILKRESKKIKLDRLNTVASPKDCQELASISVGSGSRPSSDLQARLGELAGESVENQEVQSKKPIPSKPQLKQLQVLDDQGPEREDVRKNYCSLRDETPERKSGQEKSHSVNTEEKIGIDIDHTQSYRKQMEQSRRKQQMEMEIAKSEKFGSPKKDVDEYERRSLVHEVGKPPQDVTDDSPPSKKKRMDHVDFDICTKRERNYRSSRQISEDSERTGGSPSVRHGSFHEDEDPIGSPRLLSVKGSPKVDEKVLPYSNITVREESLKFNPYDSSRREQMADMAKIKLSVLNSEDELNRWDSQMKQDAGRFDVSFPNSIIKRDSLRKRSVRDLEPGEVPSDSDEDGEHKSHSPRASALYESSRLSFLLRDREDKLRERDERLSSSLERNKFYSFALDKTITPDTKALLERAKSLSSSREENWSFLDWDSRFANFRNNKDKEKVDSAPRPIPSWYMKKKKIRTDSEGKMDDKKEDHKEEEQERQELFASRFLHSSIFEQDSKRLQHLERKEEDSDFISGRIYGKQTSEGANSTTDSIQEPVVLFHSRFMELTRMQQKEKEKDQKPKEVEKQEDTENHPKTPESAPENKDSELKTPPSVGPPSVTVVTLESAPSALEKTTGDKTVEAPLVTEEKTVEPATVSEEAKPASEPAPAPVEQLEQVDLPPGADPDKEAAMMPAGVEEGSSGDQPPYLDAKPPTPGASFSQAESNVDPEPDSTQPLSKPAQKSEEANEPKAEKPDATADAEPDANQKAEAAPESQPPASEDLEVDPPVAAKDKKPNKSKRSKTPVQAAAVSIVEKPVTRKSERIDREKLKRSNSPRGEAQKLLELKMEAEKITRTASKNSAADLEHPEPSLPLSRTRRRNVRSVYATMGDHENRSPVKEPVEQPRVTRKRLERELQEAAAVPTTPRRGRPPKTRRRADEEEENEAKEPAETLKPPEGWRSPRSQKTAAGGGPQGKKGKNEPKVDATRPEATTEVGPQIGVKESSMEPKAAEEEAGSEQKRDRKDAGTDKNPPETAPVEVVEKKPAPEKNSKSKRGRSRNSRLAVDKSASLKNVDAAVSPRGAAAQAGERESGVVAVSPEKSESPQKEDGLSSQLKSDPVDPDKEPEKEDVSASGPSPEATQLAKQMELEQAVEHIAKLAEASASAAYKADAPEGLAPEDRDKPAHQASETELAAAIGSIINDISGEPENFPAPPPYPGESQTDLQPPAGAQALQPSEEGMETDEAVSGILETEAATESSRPPVNAPDPSAGPTDTKEARGNSSETSHSVPEAKGSKEVEVTLVRKDKGRQKTTRSRRKRNTNKKVVAPVESHVPESNQAQGESPAANEGTTVQHPEAPQEEKQSEKPHSTPPQSCTSDLSKIPSTENSSQEISVEERTPTKASVPPDLPPPPQPAPVDEEPQARFRVHSIIESDPVTPPSDPSIPIPTLPSVTAAKLSPPVASGGIPHQSPPTKVTEWITRQEEPRAQSTPSPALPPDTKASDVDTSSSTLRKILMDPKYVSATSVTSTSVTTAIAEPVSAAPCLHEAPPPPVDSKKPLEEKTAPPVTNNSEIQASEVLVAADKEKVAPVIAPKITSVISRMPVSIDLENSQKITLAKPAPQTLTGLVSALTGLVNVSLVPVNALKGPVKGSVTTLKSLVSTPAGPVNVLKGPVNVLTGPVNVLTTPVNATVGTVNAAPGTVNAAASAVNATASAVTVTAGAVTAASGGVTATTGTVTMAGAVIAPSTKCKQRASANENSRFHPGSMPVIDDRPADAGSGAGLRVNTSEGVVLLSYSGQKTEGPQRISAKISQIPPASAMDIEFQQSVSKSQVKPDSVTASQPPSKGPQAPAGYANVATHSTLVLTAQTYNASPVISSVKADRPSLEKPEPIHLSVSTPVTQGGTVKVLTQGINTPPVLVHNQLVLTPSIVTTNKKLADPVTLKIETKVLQPANLGSTLTPHHPPALPSKLPTEVNHVPSGPSIPADRTVSHLAAAKLDAHSPRPSGPGPSSFPRASHPSSTASTALSTNATVMLAAGIPVPQFISSIHPEQSVIMPPHSITQTVSLSHLSQGEVRMNTPTLPSITYSIRPEALHSPRAPLQPQQIEVRAPQRASTPQPAPAGVPALASQHPPEEEVHYHLPVARATAPVQSEVLVMQSEYRLHPYTVPRDVRIMVHPHVTAVSEQPRAADGVVKVPPASKAPQQPGKEAAKTPDAKAAPTPTPAPVPVPVPLPAPAPAPHGEARILTVTPSNQLQGLPLTPPVVVTHGVQIVHSSGELFQEYRYGDIRTYHPPAQLTHTQFPAASSVGLPSRTKTAAQGPPPEGEPLQPPQPVQSTQPAQPAPPCPPSQLGQPGQPPSSKMPQVSQEAKGTQTGVEQPRLPAGPANRPPEPHTQVQRAQAETGPTSFPSPVSVSMKPDLPVSLPTQTAPKQPLFVPTTSGPSTPPGLVLPHTEFQPAPKQDSSPHLTSQRPVDMVQLLKKYPIVWQGLLALKNDTAAVQLHFVSGNNVLAHRSLPLSEGGPPLRIAQRMRLEATQLEGVARRMTVETDYCLLLALPCGRDQEDVVSQTESLKAAFITYLQAKQAAGIINVPNPGSNQPAYVLQIFPPCEFSESHLSRLAPDLLASISNISPHLMIVIASV

SEQ ID NO: 164 - protein, 4158 aa, Homo sapiens
MTFRATDSEFDLTNIEEYAENSALSRLNNIKAKQRVSYVTSTENESDTQILTFRHITKAQEKTRKRQQPIKLEPLPVLKVYQDHKQPEYIHEQNRFQLMTAGIIKRPVSIAKKSFATSSTQFLEHQDAVKKMQIHRPYVEVFSPSPPKLPHTGIGKRGLFGTRSSAYPKYTFHDREEVVKANIRDPLQIIKIIRENEHLGFLYMIPAVPRSSIEYDTYNLKVVSYENINKNDYYTISQRAVTHIYNEDIEFIEIDRWEQEYLYHRELTKIPIFSLFRKWKAFSVWRKNVRSKKITGCQKSLQKNLFIVNPHLRPALLKINELCYHLSFMGLCYIEKCHTYTLQEFKAAQVIRLAEVTERLGEFRNEAKYVVRRACRFALRAAGFVPDDCAFGPFEDYHKVQSSGSFINTPHELPTYGDSEKMTYTEQASKRHYCMRLTCFIRLNDYLIENTMHILTVNAVNSLLNHLTDKLKRTPSADVIQKWITEEKPEVPDKKGTLMVEKQEEDESLIPMFLTELMLTVQSLLFEPSLEDFLDGILGAVNHCQNTVLSVPNLVPDSYFDAFTSPYINNKLEGKTCGTGPSLAAVFEDDKNFHTIISQIKETIQAAFESARIYAATFEKFQIFFKENESLDLQALKLQEPDINFFSEQLEKYHKQHKDAVALRPTRNVGLLLIDTRLLREKLIPSPLRCLEVLNFMLPRQSKKKVDAIIFEAQDAEYKLEFVPTTTTEYVHSLLFLDEIQERIESLEDEGNIVTQMYKLMEQYQVPTPPEDFAVFATMKPSIVAVRNAIDKSVGDRESSIKQFCVHLGSDLEELNNEVNEVKLQAQDPQILDISADQDKIRLILNNLQSVLADLQKRAFQYKSYQKNFKVEVSKFEALEEVSAELKLKQLLWDSFSEWDKLQQEWLKSKFDCLDPEVLNGQVSKYAKFVTQLEKGLPPNSVVPQLKYKVEKMKEKLPVIIDLRNPTLKARHWAAIEQTVDATLVDAEIPLTLERLSQLHVFDFGQEIQDISGQASGEAALEAILKKVEDSWKTTEFVILPHRDSKDVFILGGTDDIQVLLDDSTINVATLASSRYLGPLKTRVDEWQKQLALFNQTLEEWLTCQRNWLYLESIFNAPDIQRQLPAEAKMFLQVDKSWKEIMRKVNRLPNALRAATQPGLLETFQNNNALLDQIQKCLEAYLESKRVIFPRFYFLSNDELLEILAQTRNPQAVQPHLRKCFDSISKLEFALMPPAEGKIPGIDGEPEKVYTNDILAMLSPEGERVSLGKGLKARGNVEEWLGKVEEAMFTSLRRLCKAAIADYQGKLRTDWVVAGHPSQVILTVSQIMWCRDLTECLETEHSNHIQALKNFEKVNFERLNALAAIVQGSLPKLHRNILTALITIDVHARDIVTELVQSKVETVESFDWQRQLRYYWDIDLDNCVARMALSQYTYGYEYLGACPRLVITPLTDRCYLCLMGALQLDLGGAPAGPAGTGKTETTKDLAKALAIQCVVFNCSDGLDYKMMGRFFSGLAQSGAWCCFDEFNRIDIEVLSVIAQQLITIRNAKAAKLSRFMFEGREIKLVMTCAAFITMNPGYAGRTELPDNLKALFRPFAMMVPNYALIAEVILYSEGFESSKILARKMTQMYKLCSEQLSQQDHYDFGMRAVKSVLVMAGSLKRENPDLNEDVVLIRALQDSNLPKFLTDDALLFSGIISDLFPGVQIPEHDYGILQSTIVDVMNRQNLQPEMCMVRKVIQFYETMLVRHGVMLVGPTGGGKTTVYRILAETLGNLQKLGIENSFYQAVKTYVLNPKSITMGELYGEVNNLTLEWKDGLMALSVRAAVNDTSEDHKWIISDGPVDALWIENMNTVLDDNKMLCLANSERIKLTPQIHMLFEVQDLRVASPATVSRCGMVFVDPEELKWMPYVKTWMKGISKKLTEETQEYILNLFQRYVDEGLHFINKKCSQAIPQVDISKVTTLCCLLESLILGKDGVNLAMEQTKLNTILCQTFVFCYLWSLGGNLTENYYDSFDTFIRTQFDDNPDARLPNSGDLWSIHMDFDTKRLDPWERIIPTFKYNRDVPFFEMLVPTTDTVRYGYLMEKLLAVKHSVLFTGITGVGKSVIAKGLLNKIQESAGYVPVYLNFSAQTSSARTQEIIESKLERKRKNILGAPGNKRIVIFVDDLNMPRLDRYGSQPPIELLRQYQDFGGFYDRNKLFWKEIQDVTIISACAPPGGGRNPVTPRFIRHFSMLCLPMPSEHSLKQIFQAILNGFLSDFPPAVKQTASSIVEASVEIYNKMSVDLLPTPAKSHYVFNLRDLSKCVQGILQCDPGTIREEIQIFRLFCHECQRVFHDRLINNEDKHYFHVILTEMANKHFGIAIDLEYFLNKPIIFGDFIKFGADKADRIYDDMPDIEKTANVLQDYLDDYNLTNPKEVKLVFFQDAIEHVSRIARMIRQERGNALLVGVGGTGKQSLTRLAAHICGYKCLQIELSRGYNYDSFHEDLRKLYKMAGVEDKNMVFLFTDTQIVVEEFLEDINNILNSGEVPNLFEKDELEQVLAATRPRAKEVGISEGNRDEVFQYFISKVRQKLHIVLCMSPVGEAFRSRCRMFPSLVNCCTIDWFVQWPREALLSVSKTFFSQVDAGNEELKEKLPLMCVNVHLSVSSMAERYYNELRRRYYTTPTSYLELINLYLSMLSEKRKQIISARDRVKNGLTKLLETNILVDKMKLDLSALEPVLLAKSEDVEALMEKLAVDQESADQVRNTVQEDEATAKVKAEETQAIADDAQRDLDEALPALDAANKALDSLDKADISEIRVFTKPPDLVMTVMEAISILLNAKPDWPSAKQLLGDSNFLKRLLEYDKENIKPQILAKLQKYINNPDFVPEKVEKVSKACKSMCMWVRAMDLYSRVVKVVEPKRQKLRAAQAELDITMATLREKQALLRQVEDQIQALQDEYDKGVNEKESLAKTMALTKARLVRAGKLTAALEDEQVRWEESIQKFEEEISNITGNVFIAAACVAYYGAFTAQYRQSLIECWIQDCQSLEIPIDPSFSLINILGDPYEIRQWNTDGLPRDLISTENGILVTQGRRWPLMIDPQDQANRWIRNKESKSGLKIIKLTDSNFLRILENSIRLGLPVLLEELKETLDPALEPILLKQIFISGGRLLIRLGDSDIDYDKNFRFYMTTKMPNPHYLPEVCIKVTIINFTVTKSGLEDQLLSDVVRLEKPRLEEQRIKLIVRINTDKNQLKTIEEKILRMLFTSEGNILDNEELIDTLQDSKITSGAIKTRLEEAESTEQMINVAREKYRPVATQGSVMYFVIASLSEIDPMYQYSLKYFKQLFNTTIETSVKTENLQQRLDVLLEQTLLTAYVNVSRGLFEQHKLIYSFMLCVEMMRQQGTLSDAEWNFFLRGSAGLEKERPPKPEAPWLPTATWFACCDLEESFPVFHGLTQNILSHPISIRLGSFETYINPQKWEGYSKMKHEDKHMRQEKEAAHQDPWSAGLSSFHKLILIKCCKEEKVVFALTDFVIENLGKQFIETPPVDLPTLYQDMSCNTPLVFILSTGSDPMGAFQRFARESGYSERVQSISLGQGQGPIAEKMVKDAMKSGNWVFLQNCHLAVSWMLAMEELIKTFTDPDSAIKDTFRLFLSSMPSNTFPVTVLQNSVKVTNEPPKGLRANIRRAFTEMTPSFFEENILGKKWRQIIFGICFFHAIIQERKKFGPLGWNICYEFNDSDRECALLNLKLYCKEGKIPWDALIYITGEITYGGRVTDSWDQRCLRTILKRFFSPETLEEDYKYSESGIYFAPMADSLQEFKDYIENLPLIDDPEIFGMHENANLVFQYKETSTLINTILEVQPRSSTGGEGKSNDEIVQELVASVQTRVPEKLEMEGASESLFVKDLQGRLNSLTTVLGQEVDRFNNLLKLIHTSLETLNKAIAGFVVMSEEMEKVYNSFLNNQVPALWSNTAYPSLKPLGSWVKDLILRTSFVDLWLKRGQPKSYWISGFFFPQGFLTGTLQNHARKYNLPIDELSFKYSVIPTYRDQAAVIEAAKTVQFGQELPMDMELPSPEDGVLVHGMFMDASRWDDKEMVIEDALPGQMNPVLPVVHFEPQQNYKPSPTLYHCPLYKTGARAGTLSTTGHSTNFVVTVLLPSKRSKDYWIAKGSALLCQLSE

SEQ ID NO: 165 - protein, 2564 aa, Homo sapiens
MKQLQPQPPPKMGDFYDPEHPTPEEEENEAKIENVQKTGFIKGPMFKGVASSRFLPKGTKTKVNLEEQGRQKVSFSFSLTKKTLQNRFLTALGNEKQSDTPNPPAVPLQVDSTPKMKMEIGDTLSTAEESSPPKSRVELGKIHFKKHLLHVTSRPLLATTTAVASPPTHAAPLPAVIAESTTVDSPPSSPPPPPPPAQATTLSSPAPVTEPVALPHTPITVLMAAPVPLPVDVAVRSLKEPPIIIVPESLEADTKQDTISNSLEEHVTQILNEQADISSKKEDSHIGKDEEIPDSSKISLSCKKTGSKKKSSQSEGIFLGSESDEDSVRTSSSQRSHDLKFSASIEKERDFKKSSAPLKSEDLGKPSRSKTDRDDKYFSYSKLERDTRYVSSRCRSERERRRSRSHSRSERGSRTNLSYSRSERSHYYDSDRRYHRSSPYRERTRYSRPYTDNRARESSDSEEEYKKTYSRRTSSHSSSYRDLRTSSYSKSDRDCKTETSYLEMERRGKYSSKLERESKRTSENEAIKRCCSPPNELGFRRGSSYSKHDSSASRYKSTLSKPIPKSDKFKNSFCCTELNEEIKQSHSFSLQTPCSKGSELRMINKNPEREKAGSPAPSNRLNDSPTLKKLDELPIFKSEFITHDSHDSIKELDSLSKVKNDQLRSFCPIELNINGSPGAESDLATFCTSKTDAVLMTSDDSVTGSELSPLVKACMLSSNGFQNISRCKEKDLDDTCMLHKKSESPFRETEPLVSPHQDKLMSMPVMTVDYSKTVVKEPVDTRVSCCKTKDSDIYCTLNDSNPSLCNSEAENIEPSVMKISSNSFMNVHLESKPVICDSRNLTDHSKFACEEYKQSIGSTSSASVNHFDDLYQPIGSSGIASSLQSLPPGIKVDSLTLLKCGENTSPVLDAVLKSKKSSEFLKHAGKETIVEVGSDLPDSGKGFASRENRRNNGLSGKCLQEAQEEGNSILPERRGRPEISLDERGEGGHVHTSDDSEVVFSSCDLNLTMEDSDGVTYALKCDSSGHAPEIVSTVHEDYSGSSESSNDESDSEDTDSDDSSIPRNRLQSVVVVPKNSTLPMEETSPCSSRSSQSYRHYSDHWEDERLESRRHLYEEKFESIASKACPQTDKFFLHKGTEKNPEISFTQSSRKQIDNRLPELSHPQSDGVDSTSHTDVKSDPLGHPNSEETVKAKIPSRQQEELPIYSSDFEDVPNKSWQQTTFQNRPDSRLGKTELSFSSSCEIPHVDGLHSSEELRNLGWDFSQEKPSTTYQQPDSSYGACGGHKYQQNAEQYGGTRDYWQGNGYWDPRSGRPPGTGVVYDRTQGQVPDSLTDDREEEENWDQQDGSHFSDQSDKFLLSLQKDKGSVQAPEISSNSIKDTLAVNEKKDFSKNLEKNDIKDRGPLKKRRQEIESDSESDGELQDRKKVRVEVEQGETSVPPGSALVGPSCVMDDFRDPQRWKECAKQGKMPCYFDLIEENVYLTERKKNKSHRDIKRMQCECTPLSKDERAQGEIACGEDCLNRLLMIECSSRCPNGDYCSNRRFQRKQHADVEVILTEKKGWGLRAAKDLPSNTFVLEYCGEVLDHKEFKARVKEYARNKNIHYYFMALKNDEIIDATQKGNCSRFMNHSCEPNCETQKWTVNGQLRVGFFTTKLVPSGSELTFDYQFQRYGKEAQKCFCGSANCRGYLGGENRVSIRAAGGKMKKERSRKKDSVDGELEALMENGEGLSDKNQVLSLSRLMVRIETLEQKLTCLELIQNTHSQSCLKSFLERHGLSLLWIWMAELGDGRESNQKLQEEIIKTLEHLPIPTKNMLEESKVLPIIQRWSQTKTAVPPLSEGDGYSSENTSRAHTPLNTPDPSTKLSTEADTDTPKKLMFRRLKIISENSMDSAISDATSELEGKDGKEDLDQLENVPVEEEEELQSQQLLPQQLPECKVDSETNIEASKLPTSEPEADAEIEPKESNGTKLEEPINEETPSQDEEEGVSDVESERSQEQPDKTVDISDLATKLLDSWKDLKEVYRIPKKSQTEKENTTTERGRDAVGFRDQTPAPKTPNRSRERDPDKQTQNKEKRKRRSSLSPPSSAYERGTKRPDDRYDTPTSKKKVRIKDRNKLSTEERRKLFEQEVAQREAQKQQQQMQNLGMTSPLPYDSLGYNAPHHPFAGYPPGYPMQAYVDPSNPNAGKVLLPTPSMDPVCSPAPYDHAQPLVGHSTEPLSAPPPVPVVPHVAAPVEVSSSQYVAQSDGVVHQDSSVAVLPVPAPGPVQGQNYSVWDSNQQSVSVQQQYSPAQSQATIYYQGQTCPTVYGVTSPYSQTTPPIVQSYAQPSLQYIQGQQIFTAHPQGVVVQPAAAVTTIVAPGQPQPLQPSEMVVTNNLLDLPPPSPPKPKTIVLPPNWKTARDPEGKIYYYHVITRQTQWDPPTWESPGDDASLEHEAEMDLGTPTYDENPMKASKKPKTAEADTSSELAKKSKEVFRKEMSQFIVQCLNPYRKPDCKVGRITTTEDFKHLARKLTHGVMNKELKYCKNPEDLECNENVKHKTKEYIKKYMQKFGAVYKPKEDTELE

SEQ ID NO: 166 - protein, 2944 aa, Homo sapiens
MTLRLLVAALCAGILAEAPRVRAQHRERVTCTRLYAADIVFLLDGSSSIGRSNFREVRSFLEGLVLPFSGAASAQGVRFATVQYSDDPRTEFGLDALGSGGDVIRAIRELSYKGGNTRTGAAILHVADHVFLPQLARPGVPKVCILITDGKSQDLVDTAAQRLKGQGVKLFAVGIKNADPEELKRVASQPTSDFFFFVNDFSILRTLLPLVSRRVCTTAGGVPVTRPPDDSTSAPRDLVLSEPSSQSLRVQWTAASGPVTGYKVQYTPLTGLGQPLPSERQEVNVPAGETSVRLRGLRPLTEYQVTVIALYANSIGEAVSGTARTTALEGPELTIQNTTAHSLLVAWRSVPGATGYRVTWRVLSGGPTQQQELGPGQGSVLLRDLEPGTDYEVTVSTLFGRSVGPATSLMARTDASVEQTLRPVILGPTSILLSWNLVPEARGYRLEWRRETGLEPPQKVVLPSDVTRYQLDGLQPGTEYRLTLYTLLEGHEVATPATVVPTGPELPVSPVTDLQATELPGQRVRVSWSPVPGATQYRIIVRSTQGVERTLVLPGSQTAFDLDDVQAGLSYTVRVSARVGPREGSASVLTVRREPETPLAVPGLRVVVSDATRVRVAWGPVPGASGFRISWSTGSGPESSQTLPPDSTATDITGLQPGTTYQVAVSVLRGREEGPAAVIVARTDPLGPVRTVHVTQASSSSVTITWTRVPGATGYRVSWHSAHGPEKSQLVSGEATVAELDGLEPDTEYTVHVRAHVAGVDGPPASVVVRTAPEPVGRVSRLQILNASSDVLRITWVGVTGATAYRLAWGRSEGGPMRHQILPGNTDSAEIRGLEGGVSYSVRVTALVGDREGTPVSIVVTTPPEAPPALGTLHVVQRGEHSLRLRWEPVPRAQGFLLHWQPEGGQEQSRVLGPELSSYHLDGLEPATQYRVRLSVLGPAGEGPSAEVTARTESPRVPSIELRVVDTSIDSVTLAWTPVSRASSYILSWRPLRGPGQEVPGSPQTLPGISSSQRVTGLEPGVSYIFSLTPVLDGVRGPEASVTQTPVCPRGLADVVFLPHATQDNAHRAEATRRVLERLVLALGPLGPQAVQVGLLSYSHRPSPLFPLNGSHDLGIILQRIRDMPYMDPSGNNLGTAVVTAHRYMLAPDAPGRRQHVPGVMVLLVDEPLRGDIFSPIREAQASGLNVVMLGMAGADPEQLRRLAPGMDSVQTFFAVDDGPSLDQAVSGLATALCQASFTTQPRPEPCPVYCPKGQKGEPGEMGLRGQVGPPGDPGLPGRTGAPGPQGPPGSATAKGERGFPGADGRPGSPGRAGNPGTPGAPGLKGSPGLPGPRGDPGERGPRGPKGEPGAPGQVIGGEGPGLPGRKGDPGPSGPPGPRGPLGDPGPRGPPGLPGTAMKGDKGDRGERGPPGPGEGGIAPGEPGLPGLPGSPGPQGPVGPPGKKGEKGDSEDGAPGLPGQPGSPGEQGPRGPPGAIGPKGDRGFPGPLGEAGEKGERGPPGPAGSRGLPGVAGRPGAKGPEGPPGPTGRQGEKGEPGRPGDPAVVGPAVAGPKGEKGDVGPAGPRGATGVQGERGPPGLVLPGDPGPKGDPGDRGPIGLTGRAGPPGDSGPPGEKGDPGRPGPPGPVGPRGRDGEVGEKGDEGPPGDPGLPGKAGERGLRGAPGVRGPVGEKGDQGDPGEDGRNGSPGSSGPKGDRGEPGPPGPPGRLVDTGPGAREKGEPGDRGQEGPRGPKGDPGLPGAPGERGIEGFRGPPGPQGDPGVRGPAGEKGDRGPPGLDGRSGLDGKPGAAGPSGPNGAAGKAGDPGRDGLPGLRGEQGLPGPSGPPGLPGKPGEDGKPGLNGKNGEPGDPGEDGRKGEKGDSGASGREGRDGPKGERGAPGILGPQGPPGLPGPVGPPGQGFPGVPGGTGPKGDRGETGSKGEQGLPGERGLRGEPGSVPNVDRLLETAGIKASALREIVETWDESSGSFLPVPERRRGPKGDSGEQGPPGKEGPIGFPGERGLKGDRGDPGPQGPPGLALGERGPPGPSGLAGEPGKPGIPGLPGRAGGVGEAGRPGERGERGEKGERGEQGRDGPPGLPGTPGPPGPPGPKVSVDEPGPGLSGEQGPPGLKGAKGEPGSNGDQGPKGDRGVPGIKGDRGEPGPRGQDGNPGLPGERGMAGPEGKPGLQGPRGPPGPVGGHGDPGPPGAPGLAGPAGPQGPSGLKGEPGETGPPGRGLTGPTGAVGLPGPPGPSGLVGPQGSPGLPGQVGETGKPGAPGRDGASGKDGDRGSPGVPGSPGLPGPVGPKGEPGPTGAPGQAVVGLPGAKGEKGAPGGLAGDLVGEPGAKGDRGLPGPRGEKGEAGRAGEPGDPGEDGQKGAPGPKGFKGDPGVGVPGSPGPPGPPGVKGDLGLPGLPGAPGVVGFPGQTGPRGEMGQPGPSGERGLAGPPGREGIPGPLGPPGPPGSVGPPGASGLKGDKGDPGVGLPGPRGERGEPGIRGEDGRPGQEGPRGLTGPPGSRGERGEKGDVGSAGLKGDKGDSAVILGPPGPRGAKGDMGERGPRGLDGDKGPRGDNGDPGDKGSKGEPGDKGSAGLPGLRGLLGPQGQPGAAGIPGDPGSPGKDGVPGIRGEKGDVGFMGPRGLKGERGVKGACGLDGEKGDKGEAGPPGRPGLAGHKGEMGEPGVPGQSGAPGKEGLIGPKGDRGFDGQPGPKGDQGEKGERGTPGIGGFPGPSGNDGSAGPPGPPGSVGPRGPEGLQGQKGERGPPGERVVGAPGVPGAPGERGEQGRPGPAGPRGEKGEAALTEDDIRGFVRQEMSQHCACQGQFIASGSRPLPSYAADTAGSQLHAVPVLRVSHAEEEERVPPEDDEYSEYSEYSVEEYQDPEAPWDSDDPCSLPLDEGSCTAYTLRWYHRAVTGSTEACHPFVYGGCGGNANRFGTREACERRCPPRVVQSQGTGTAQD

SEQ ID NO: 167 - protein, 2504 aa, Homo sapiens
MSGSTQPVAQTWRATEPRYPPHSLSYPVQIARTHTDVGLLEYQHHSRDYASHLSPGSIIQPQRRRPSLLSEFQPGNERSQELHLRPESHSYLPELGKSEMEFIESKRPRLELLPDPLLRPSPLLATGQPAGSEDLTKDRSLTGKLEPVSPPSPPHTDPELELVPPRLSKEELIQNMDRVDREITMVEQQISKLKKKQQQLEEEAAKPPEPEKPVSPPPIESKHRSLVQIIYDENRKKAEAAHRILEGLGPQVELPLYNQPSDTRQYHENIKINQAMRKKLILYFKRRNHARKQWEQKFCQRYDQLMEAWEKKVERIENNPRRRAKESKVREYYEKQFPEIRKQRELQERMQRVGQRGSGLSMSAARSEHEVSEIIDGLSEQENLEKQMRQLAVIPPMLYDADQQRIKFINMNGLMADPMKVYKDRQVMNMWSEQEKETFREKFMQHPKNFGLIASFLERKTVAECVLYYYLTKKNENYKSLVRRSYRRRGKSQQQQQQQQQQQQQQQQQPMPRSSQEEKDEKEKEKEAEKEEEKPEVENDKEDLLKEKTDDTSGEDNDEKEAVASKGRKTANSQGRRKGRITRSMANEANSEEAITPQQSAELASMELNESSRWTEEEMETAKKGLLEHGRNWSAIARMVGSKTVSQCKNFYFNYKKRQNLDEILQQHKLKMEKERNARRKKKKAPAAASEEAAFPPVVEDEEMEASGVSGNEEEMVEEAEATVNNSSDTESIPSPHTEAAKDTGQNGPKPPATLGADGPPPGPPTPPPEDIPAPTEPTPASEATGAPTPPPAPPSPSAPPPVVPKEEKEEETAAAPPVEEGEEQKPPAAEELAVDTGKAEEPVKSECTEEAEEGPAKGKDAEAAEATAEGALKAEKKEGGSGRATTAKSSGAPQDSDSSATCSADEVDEAEGGDKNRLLSPRPSLLTPTGDPRANASPQKPLDLKQLKQRAAAIPPIQVTKVHEPPREDAAPTKPAPPAPPPPQNLQPESDAPQQPGSSPRGKSRSPAPPADKEAEKPVFFPAFAAEAQKLPGDPPCWTSGLPFPVPPREVIKASPHAPDPSAFSYAPPGHPLPLGLHDTARPVLPRPPTISNPPPLISSAKHPSVLERQIGAISQGMSVQLHVPYSEHAKAPVGPVTMGLPLPMDPKKLAPFSGVKQEQLSPRGQAGPPESLGVPTAQEASVLRGTALGSVPGGSITKGIPSTRVPSDSAITYRGSITHGTPADVLYKGTITRIIGEDSPSRLDRGREDSLPKGHVIYEGKKGHVLSYEGGMSVTQCSKEDGRSSSGPPHETAAPKRTYDMMEGRVGRAISSASIEGLMGRAIPPERHSPHHLKEQHHIRGSITQGIPRSYVEAQEDYLRREAKLLKREGTPPPPPPSRDLTEAYKTQALGPLKLKPAHEGLVATVKEAGRSIHEIPREELRHTPELPLAPRPLKEGSITQGTPLKYDTGASTTGSKKHDVRSLIGSPGRTFPPVHPLDVMADARALERACYEESLKSRPGTASSSGGSIARGAPVIVPELGKPRQSPLTYEDHGAPFAGHLPRGSPVTTREPTPRLQEGSLSSSKASQDRKLTSTPREIAKSPHSTVPEHHPHPISPYEHLLRGVSGVDLYRSHIPLAFDPTSIPRGIPLDAAAAYYLPRHLAPNPTYPHLYPPYLIRGYPDTAALENRQTIINDYITSQQMHHNAATAMAQRADMLRGLSPRESSLALNYAAGPRGIIDLSQVPHLPVLVPPTPGTPATAMDRLAYLPTAPQPFSSRHSSSPLSPGGPTHLTKPTTTSSSERERDRDRERDRDREREKSILTSTTTVEHAPIWRPGTEQSSGSSGGGGGSSSRPASHSHAHQHSPISPRTQDALQQRPSVLHNTGMKGIITAVEPSTPTVLRSTSTSSPVRPAATFPPATHCPLGGTLDGVYPTLMEPVLLPKEAPRVARPERPRADTGHAFLAKPPARSGLEPASSPSKGSEPRPLVPPVSGHATIARTPAKNLAPHHASPDPPAPPASASDPHREKTQSKPFSIQELELRSLGYHGSSYSPEGVEPVSPVSSPSLTHDKGLPKHLEELDKSHLEGELRPKQPGPVKLGGEAAHLPHLRPLPESQPSSSPLLQTAPGVKGHQRVVTLAQHISEVITQDYTRHHPQQLSAPLPAPLYSFPGASCPVLDLRRPPSDLYLPPPDHGAPARGSPHSEGGKRSPEPNKTSVLGGGEDGIEPVSPPEGMTEPGHSRSAVYPLLYRDGEQTEPSRMGSKSPGNTSQPPAFFSKLTESNSAMVKSKKQEINKKLNTHNRNEPEYNISQPGTEIFNMPAITGTGLMTYRSQAVQEHASTNMGLEAIIRKALMGKYDQWEESPPLSANAFNPLNASASLPAAMPITAADGRSDHTLTSPGGGGKAKVSGRPSSRKAKSPAPGLASGDRPPSVSSVHSEGDCNRRTPLTNRVWEDRPSSAGSTPFPYNPLIMRLQAGVMASPPPPGLPAGSGPLAGPHHAWDEEPKPLLCSQYETLSDSE

SEQ ID NO: 168 - protein, 4981 aa, Homo sapiens
MDLAPDRATGRPWLPLHTLSVSQLLRVFWLLSLLPGQAWVHGAEPRQVFQVLEEQPPGTLVGTIQTRPGFTYRLSESHALFAINSSTGALYTTSTIDRESLPSDVINLVVLSSAPTYPTEVRVLVRDLNDNAPVFPDPSIVVTFKEDSSSGRQVILDTATDSDIGSNGVDHRSYRIIRGNEAGRFRLDITLNPSGEGAFLHLVSKGGLDREVTPQYQLLVEVEDKGEPKRRGYLQVNVTVQDINDNPPVFGSSHYQAGVPEDAVVGSSVLQVAAADADEGTNADIRYRLQDEGTPFQMDPETGLITVREPLDFEARRQYSLTVQAMDRGVPSLTGRAEALIQLLDVNDNDPVVKFRYFPATSRYASVDENAQVGTVVALLTVTDADSPAANGNISVQILGGNEQRHFEVQSSKVPNLSLIKVASALDRERIPSYNLTVSVSDNYGAPPGAAVQARSSVASLVIFVNDINDHPPVFSQQVYRVNLSEEAPPGSYVSGISATDGDSGLNANLRYSIVSGNGLGWFHISEHSGLVTTGSSGGLDRELASQIVLNISARDQGVHPKVSYAQLVVTLLDVNDEKPVFSQPEGYDVSVVENAPTGTELLMLRATDGDLGDNGTVRFSLQEAETDRRSFRLDPVSGRLSTISSLDREEQAFYSLLVLATDLGSPPQSSMARINVSLLDINDNSPVFYPVQYFAHIKENEPGGSYITTVSATDPDLGTNGTVKYSISAGDRSRFQVNAQSGVISTRMALDREEKTAYQLQIVATDGGNLQSPNQAIVTITVLDTQDNPPVFSQVAYSFVVFENVALGYHVGSVSASTMDLNSNISYLITTGDQKGMFAINQVTGQLTTANVIDREEQSFYQLKVVASGGTVTGDTMVNITVKDLNDNSPHFLQAIESVNVVENWQAGHSIFQAKAVDPDEGVNGMVLYSLKQNPKNLFAINEKNGTISLLGPLDVHAGSYQIEILASDMGVPQLSSSVILTVYVHDVNDNSPVFDQLSYEVTLSESEPVNSRFFKVQASDKDSGANGEIAYTIAEGNTGDAFGIFPDGQLYIKSELDRELQDRYVLMVVASDRAVEPLSATVNVTVILEDVNDNRPLFNSTNYTFYFEEEQRAGSFVGKVSAVDKDFGPNGEVRYSFEMVQPDFELHAISGEITNTHQFDRESLMRRRGTAVFSFTVIATDQGIPQPLKDQATVHVYMKDINDNAPKFLKDFYQATISESAANLTQVLRVSASDVDEGNNGLIHYSIIKGNEERQFAIDSTSGQVTLIGKLDYEATPAYSLVIQAVDSGTIPLNSTCTLNIDILDENDNTPSFPKSTLFVDVLENMRIGELVSSVTATDSDSGDNADLYYSITGTNNHGTFSISPNTGSIFLAKKLDFETQSLYKLNITAKDQGRPPRSSTMSVVIHVRDFNDNPPSFPPGDIFKSIVENIPIGTSVISVTAHDPDADINGQLSYTIIQQMPRGNHFTIDEVKGTIYTNAEIDREFANLFELTVKANDQAVPIETRRYALKNVTILVTDLNDNVPMFISQNALAADPSAVIGSVLTTIMAADPDEGANGEIEYEIINGDTDTFIVDRYSGDLRVASALVPSQLIYNLIVSATDLGPERRKSTTELTIILQGLDGPVFTQPKYITILKEGEPIGTNVISIEAASPRGSEAPVEYYIVSVRCEEKTVGRLFTIGRHTGIIQTAAILDREQGACLYLVDVYAIEKSTAFPRTQRAEVEITLQDINDNPPVFPTDMLDLTVEENIGDGSKIMQLTAMDADEGANALVTYTIISGADDSFRIDPESGDLIATRRLDRERRSKYSLLVRADDGLQSSDMRINITVSDVNDHTPKFSRPVYSFDIPEDTIPGSLVAAILATDDDSGVNGEITYIVNEDDEDGIFFLNPITGVFNLTRLLDYEVQQYYILTVRAEDGGGQFTTIRVYFNILDVNDNPPIFSLNSYSTSLMENLPVGSTVLVFNVTDADDGINSQLTYSIASGDSLGQFTVDKNGVLKVLKALDRESQSFYNLVVQVHDLPQIPASRFTSTAQVSIILLDVNDNPPTFLSPKLTYIPENTPIDTVVFKAQATDPDSGPNSYIEYTLLNPLGNKFSIGTIDGEVRLTGELDREEVSNYTLTVVATDKGQPSLSSSTEVVVMVLDINDNNPIFAQALYKVEINENTLTGTDIIQVFAADGDEGTNGQVRYGIVNGNTNQEFRIDSVTGAITVAKPLDREKTPTYHLTVQATDRGSTPRTDTSTVSIVLLDINDFVPVFELSPYSVNVPENLGTLPRTILQVVARDDDRGSNSKLSYVLFGGNEDNAFTLSASGELGVTQSLDRETKERFVLMITATDSGSPALTGTGTINVIVDDVNDNVPTFASKAYFTTIPEDAPTGTDVLLVNASDADASKNAVIRIIGGNSQFTINPSTGQIITSALLDRETKDNYTLVVVCSDAGSPEPLSSSTSVLVTVTDVNDNPPRFQHHPYVTHIPSPTLPGSFVFAVTVTDADIGPNSELHYSLSGRNSEKFHIDPLRGAIMAAGPLNGASEVTFSVHVKDGGSFPKTDSTTVTVRFVNKADFPKVRAKEQTFMFPENQPVSSLVTTITGSSLRGEPMSYYIASGNLGNTFQIDQLTGQVSISQPLDFEKIQKYVVWIEARDGGFPPFSSYEKLDITVLDVNDNAPIFKEDPFISEILENLSPRKILTVSAMDKDSGPNGQLDYEIVNGNMENSFSINHATGEIRSVRPLDREKVSHYVLTIKSSDKGSPSQSTSVKVMINILDENDNAPRFSQIFSAHVPENSPLGYTVTRVTTSDEDIGINAISRYSIMDASLPFTINPSTGDIVISRPLNREDTDRYRIRVSAHDSGWTVSTDVTIFVTDINDNAPRFSRTSYYLDCPELTEIGSKVTQVFATDPDEGSNGQVFYFIKSQSEYFRINATTGEIFNKQILKYQNVTGFSNVNINRHSFIVTSSDRGKPSLISETTVTINIVDSNDNAPQFLKSKYFTPVTKNVKVGTKLIRVTAIDDKDFGLNSEVEYFISNDNHLGKFKLDNDTGWISVASSLISDLNQNFFITVTAKDKGNPPLSSQATVHITVTEENYHTPEFSQSHMSATIPESHSIGSIVRTVSARDRDAAMNGLIKYSISSGNEEGIFAINSSTGILTLAKALDYELCQKHEMTISAIDGGWVARTGYCSVTVNVIDVNDNSPVFLSDDYFPTVLENAPSGTTVIHLNATDADSGTNAVIAYTVQSSDSDLFVIDPNTGVITTQGFLDFETKQSYHLTVKAFNVPDEERCSFATVNIQLKGTNEYVPRFVSKLYYFEISEAAPKGTIVGEVFASDRDLGTDGEVHYLIFGNSRKKGFQINKKTGQIYVSGILDREKEERVSLKVLAKNFGSIRGADIDEVTVNVTVLDANDPPIFTLNIYSVQISEGVPIGTHVTFVSAFDSDSIPSWSRFSYFIGSGNENGAFSINPQTGQITVTAELDRETLPIYNLSVLAVDSGTPSATGSASLLVTLEDINDNGPMLTVSEGEVMENKRPGTLVMTLQSTDPDLPPNQGPFTYYLLSTGPATSYFSLSTAGVLSTTREIDREQIADFYLSVVTKDSGVPQMSSTGTVHITVIDQNDNPSQSRTVEIFVNYYGNLFPGGILGSVKPQDPDVLDSFHCSLTSGVTSLFSIPGGTCDLNSQPRSTDGTFDLTVLSNDGVHSTVTSNIRVFFAGFSNATVDNSILLRLGVPTVKDFLTNHYLHFLRIASSQLTGLGTAVQLYSAYEENNRTFLLAAVKRNHNQYVNPSGVATFFESIKEILLRQSGVKVESVDHDSCVHGPCQNGGSCLRRLAVSSVLKSRESLPVIIVANEPLQPFLCKCLPGYAGSWCEIDIDECLPSPCHSGGTCHNLVGGFSCSCPDGFTGRACERDINECLQSPCKNGAICQNFPGSFNCVCKTGYTGKMCESSVNYCECNPCFNGGSCQSGVDSYYCHCPFGVFGKHCELNSYGFEELSYMEFPSLDPNNNYIYVKFATIKSHALLLYNYDNQTGDRAEFLALEIAEERLRFSYNLGSGTYKLTTMKKVSDGHFHTVIARRAGMAASLTVDSCSENQEPGYCTVSNVAVSDDWTLDVQPNRVTVGGIRSLEPILQRRGHVESHDFVGCIMEFAVNGRPLEPSQALAAQGILDQCPRLEGACTRSPCQHGGTCMDYWSWQQCHCKEGLTGKYCEKSVTPDTALSLEGKGRLDYHMSQNEKREYLLRQSLRGAMLEPFGVNSLEVKFRTRSENGVLIHIQESSNYTTVKIKNGKVYFTSDAGIAGKVERNIPEVYVADGHWHTFLIGKNGTATVLSVDRIYNRDIIHPTQDFGGLDVLTISLGGIPPNQAHRDAQTAGFDGCIASMWYGGESLPFSGKHSLASISKTDPSVKIGCRGPNICASNPCWGDLLCINQWYAYRCVPPGDCASHPCQNGGSCEPGLHSGFTCSCPDSHTGRTCEMVVACLGVLCPQGKVCKAGSPAGHVCVLSQGPEEISLPLWAVPAIVGSCATVLALLVLSLILCNQCRGKKAKNPKEEKKPKEKKKKGSENVAFDDPDNIPPYGDDMTVRKQPEGNPKPDIIERENPYLIYDETDIPHNSETIPSAPLASPEQEIEHYDIDNASSIAPSDADIIQHYKQFRSHTPKFSIQRHSPLGFARQSPMPLGASSLTYQPSYGQGLRTSSLSHSACPTPNPLSRHSPAPFSKSSTFYRNSPARELHLPIRDGNTLEMHGDTCQPGIFNYATRLGRRSKSPQAMASHGSRPGSRLKQPIGQIPLESSPPVGLSIEEVERLNTPRPRNPSICSADHGRSSSEEDCRRPLSRTRNPADGIPAPESSSDSDSHESFTCSEMEYDREKPMVYTSRMPKLSQVNESDADDEDNYGARLKPRRYHGRRAEGGPVGTQAAAPGTADNTLPMKLGQQAGTFNWDNLLNWGPGFGHYVDVFKDLASLPEKAAANEEGKAGTTKPVPKDGEAEQYV

SEQ ID NO: 169 - protein, 4471 aa, Homo sapiens
MVPEEVEVEIDEIPVLSEEGEEEEETYSQKVESVDKVRAKRVSLRTESLGQPLNREDEEMDKEISEKLPSKRTAKHIMEKMHLHMLCTPLPEEFLDQNVVFFLRNTKEAISEATDMKEAMEIMPETLEYGIINANVLHFLKNIICQVFLPALSFNQHRTSTTVGVTSGEVSNSSEHESDLPPMPGEAVEYHSIQLIRDEFLMNVQKFASNIQRTMQQLEGEIKLEMPIISVEGEVSDLAADPETVDILEQCVINWLNQISTAVEAQLKKTPQGKGPLAEIEFWRERNATLSALHEQTKLPIVRKVLDVIKESDSMLVANLQPVFTELFKFHTEASDNVRFLSTVERYFKNITHGSGFHVVLDTIPAMMSALRMVWIISRHYNKDERMIPLMERIAWEIAERVCRVVNLRTLFKENRASAQSKTLEARNTLRLWKKAYFDTRAKIEASGREDRWEFDRKRLFERTDYMATICQDLSDVLQILEEFYNIFGPELKAVTGDPKRIDDVLCRVDGLVTPMENLTFDPFSIKSSQFWKYVMDEFKIEVLIDIINKIFVQNLENPPLYKNHPPVAGAIYWERSLFFRIKHTILRFQEVQEILDSDRGQEVKQKYLEVGRTMKEYEDRKYEQWMEVTEQVLPALMKKSLLTKSSIATEEPSTLERGAVFAINFSPALREIINETKYLEQLGFTVPELARNVALQEDKFLRYTAGIQRMLDHYHMLIGTLNDAESVLLKDHSQELLRVFRSGYKRLNWNSLGIGDYITGCKQAIGKFESLVHQIHKNADDISSRLTLIEAINLFKYPAAKSEEELPGVKEFFEHIERERASDVDHMVRWYLAIGPLLTKVEGLVVHTNTGKAPKLASYYKYWEKKIYEVLTKLILKNLQSFNSLILGNVPLFHTETILTAPEIILHPNTNEIDKMCFHCVRNCVEITKHFVRWMNGSCIECPPQKGEEEEVVIINFYNDISLNPQIIEQAVMIPQNVHRILINLMKYLQKWKRYRPLWKLDKAIVMEKFAAKKPPCVAYDEKLQFYSKIAYEVMRHPLIKDEHCIRLQLRHLANTVQENAKSWVISLGKLLNESAKEELYNLHEEMEHLAKNLRKIPNTLEDLKFVLATIAEIRSKSLVMELRYRDVQERYRTMAMYNLFPPDAEKELVDKIESIWSNLFNDSVNVEHALGDIKRTFTELTRGEIMNYRVQIEEFAKRFYSEGPGSVGDDLDKGVELLGVYERELARHEKSRQELANAEKLFDLPITMYPELLKVQKEMSGLRMIYELYEGLKVAKEEWSQTLWINLNVQILQEGIEGFLRALRKLPRPVRGLSVTYYLEAKMKAFKDSIPLLLDLKNEALRDRHWKELMEKTSVFFEMTETFTLENMFAMELHKHTDVLNEIVTAAIKEVAIEKAVKEILDTWENMKFTVVKYCKGTQERGYILGSVDEIIQSLDDNTFNLQSISGSRFVGPFLQTVHKWEKTLSLIGEVIEIWMLVQRKWMYLESIFIGGDIRSQLPEEAKKFDNIDKVFKRIMGETLKDPVIKRCCEAPNRLSDLQNVSEGLEKCQKSLNDYLDSKRNAFPRFFFISDDELLSILGSSDPLCVQEHMIKMYDNIASLRFNDGDSGEKLVSAMISAEGEVMEFRKILRAEGRVEDWMTAVLNEMRRTNRLITKEAIFRYCEDRSRVDWMLLYQGMVVLAASQVWWTWEVEDVFHKAQKGEKQAMKNYGRKMHRQIDELVTRITMPLSKNDRKKYNTVLIIDVHARDIVDSFIRGSILEAREFDWESQLRFYWDREPDELNIRQCTGTFGYGYEYMGLNGRLVITPLTDRIYLTLTQALSMYLGGAPAGPAGTGKTETTKDLAKALGLLCVVTNCGEGMDYRAVGKIFSGLAQCGAWGCFDEFNRIDASVLSVISSQIQTIRNALIHQLTTFQFEGQEISLDSRMGIFITMNPGYAGRTELPESVKALFRPVVVIVPDLQQICEIMLFSEGFLEAKTLAKKMTVLYKLAREQLSKQYHYDFGLRALKSVLVMAGELKRGSSDLREDVVLMRALRDMNLPKFVFEDVPLFLGLISDLFPGLDCPRVRYPDFNDAVEQVLEENGYAVLPIQVDKVVQMFETMLTRHTTMVVGPTRGGKSVVINTLCQAQTKLGLTTKLYILNPKAVSVIELYGILDPTTRDWTDGVLSNIFREINKPTDKKERKYILFDGDVDALWVENMNSVMDDNRLLTLANGERIRLQAHCALLFEVGDLQYASPATVSRCGMVYVDPKNLKYRPYWKKWVNQIPNKVEQYNLNSLFEKYVPYLMDVIVEGIVDGRQAEKLKTIVPQTDLNMVTQLAKMLDALLEGEIEDLDLLECYFLEALYCSLGASLLEDGRMKFDEYIKRLASLSTVDTEGVWANPGELPGQLPTLYDFHFDNKRNQWVPWSKLVPEYIHAPERKFINILVHTVDTTRTTWILEQMVKIKQPVIFVGESGTSKTATTQNFLKNLSEETNIVLMVNFSSRTTSMDIQRNLEANVEKRTKDTYGPPMGKRLLVFMDDMNMPRVDEYGTQQPIALLKLLLEKGYLYDRGKELNCKSIRDLGFIAAMGKAGGGRNEVDPRFISLFSVFNVPFPSEESLHLIYSSILKGHTSTFHESIVAVSGKLTFCTLALYKNIVQDLPPTPSKFHYIFNLRDLSRVFNGLVLTNPERFQTVAQMVRVWRNECLRVFHDRLISETDKQLVQQHIGSLVVEHFKDDVEVVMRDPILFGDFQMALHEGEPRIYEDIQDYEAAKALFQEILEEYNESNTKMNLVLFDDALEHLTRVHRIIRMDRGHALLVGVGGSGKQSLSRLAAFTASCEVFEILLSRGYSENSFREDLKSLYLKLGIENKAMIFLFTDAHVAEEGFLELINNMLTSGIVPALFSEEEKESILSQIGQEALKQGMGPAKESVWQYFVNKSANNLHIVLGMSPVGDTLRTWCRNFPGMVNNTGIDWFMPWPPQALHAVAKSFLGYNPMIPAENIENVVKHVVLVHQSVDHYSQQFLQKLRRSNYVTPKNYLDFINTYSKLLDEKTQCNIAQCKRLDGGLDKLKEATIQLDELNQKLAEQKIVLAEKSAACEALLEEIAVNTAVAEEKKKLAEEKAMEIEEQNKVIAMEKAEAETTLAEVMPILEAAKLELQKLDKSDVTEIRSFAKPPKQVQTVCECILIMKGYKELNWKTAKGVMSDPNFLRSLMEIDFDSITQSQVKNIKGLLKTLNTTTEEMEAVSKAGLGMLKFVEAVMGYCDVFREIKPKREKVARLERNFYLTKRELERIQNELAAIQKELETLGAKYEAAILEKQKLQEEAEIMERRLIAADKLISGLGSENIRWLNDLDELMHRRVKLLGDCLLCAAFLSYEGAFTWEFRDEMVNRIWQNDILEREIPLSQPFRLESLLTDDVEISRWGSQGLPPDELSVQNGILTTRASRFPLCIDPQQQALNWIKRKEEKNNLRVASFNDPDFLKQLEMSIKYGTPFLFRDVDEYIDPVIDNVLEKNIKVSQGRQFIILGDKEVDYDSNFRLYLNTKLANPRYSPSVFGKAMVINYTVTLKGLEDQLLSVLVAYERRELEEQREHLIQETSENKNLLKDLEDSLLRELATSTGNMLDNVDLVHTLEETKSKATEVSEKLKLAEKTALDIDRLRDGYRPAARRGAILFFVLSEMALVNSMYQYSLIAFLEVFRLSLKKSLPDSILMKRLRNIMDTLTFSIYNHGCTGLFERHKLLFSFNMTIKIEQAEGRVPQEELDFFLKGNISLEKSKRKKPCAWLSDQGWEDIILLSEMFSDNFGQLPDDVENNQTVWQEWYDLDSLEQFPVPLGYDNNITPFQKLLILRCFRVDRVYRAVTDYVTVTMGEKYVQPPMISFEAIFEQSTPHSPIVFILSPGSDPATDLMKLAERSGFGGNRLKFLAMGQGQEKVALQLLETAVARGQWLMLQNCHLLVKWLKDLEKSLERITKPHPDFRLWLTTDPTKGFPIGILQKSLKVVTEPPNGLKLNMRATYFKISHEMLDQCPHPAFKPLVYVLAFFHAVVQERRKFGKIGWNVYYDFNESDFQVCMEILNTYLTKAFQQRDPRIPWGSLKYLIGEVMYGGRAIDSFDRRILTIYMDEYLGDFIFDTFQPFHFFRNKEVDYKIPVGDEKEKFVEAIEALPLANTPEVFGLHPNAEIGYYTQAARDMWAHLLELQPQTGESSSGISRDDYIGQVAKEIENKMPKVFDLDQVRKRLGTGLSPTSVVLLQELERFNKLVVRMTKSLAELQRALAGEVGMSNELDDVARSLFIGHIPNIWRRLAPDTLKSLGNWMVYFLRRFSQYMLWVTESEPSVMWLSGLHIPESYLTALVQATCRKNGWPLDRSTLFTQVTKFQDADEVNERAGQGCFVSGLYLEGADWDIEKGCLIKSKPKVLVVDLPILKIIPIEAHRLKLQNTFRTPVYTTSMRRNAMGVGLVFEADLFTTRHISHWVLQGVCLTLNSD

SEQ ID NO: 170 - protein, 1028 aa, Homo sapiens
MRAARALLPLLLQACWTAAQDEPETPRAVAFQDCPVDLFFVLDTSESVALRLKPYGALVDKVKSFTKRFIDNLRDRYYRCDRNLVWNAGALHYSDEVEIIQGLTRMPGGRDALKSSVDAVKYFGKGTYTDCAIKKGLEQLLVGGSHLKENKYLIVVTDGHPLEGYKEPCGGLEDAVNEAKHLGVKVFSVAITPDHLEPRLSIIATDHTYRRNFTAADWGQSRDAEEAISQTIDTIVDMIKNNVEQVCCSFECQPARGPPGLRGDPGFEGERGKPGLPGEKGEAGDPGRPGDLGPVGYQGMKGEKGSRGEKGSRGPKGYKGEKGKRGIDGVDGVKGEMGYPGLPGCKGSPGFDGIQGPPGPKGDPGAFGLKGEKGEPGADGEAGRPGSSGPSGDEGQPGEPGPPGEKGEAGDEGNPGPDGAPGERGGPGERGPRGTPGTRGPRGDPGEAGPQGDQGREGPVGVPGDPGEAGPIGPKGYRGDEGPPGSEGARGAPGPAGPPGDPGLMGERGEDGPAGNGTEGFPGFPGYPGNRGAPGINGTKGYPGLKGDEGEAGDPGDDNNDIAPRGVKGAKGYRGPEGPQGPPGHQGPPGPDECEILDIIMKMCSCCECKCGPIDLLFVLDSSESIGLQNFEIAKDFVVKVIDRLSRDELVKFEPGQSYAGVVQYSHSQMQEHVSLRSPSIRNVQELKEAIKSLQWMAGGTFTGEALQYTRDQLLPPSPNNRIALVITDGRSDTQRDTTPLNVLCSPGIQVVSVGIKDVFDFIPGSDQLNVISCQGLAPSQGRPGLSLVKENYAELLEDAFLKNVTAQICIDKKCPDYTCPITFSSPADITILLDGSASVGSHNFDTTKRFAKRLAERFLTAGRTDPAHDVRVAVVQYSGTGQQRPERASLQFLQNYTALASAVDAMDFINDATDVNDALGYVTRFYREASSGAAKKRLLLFSDGNSQGATPAAIEKAVQEAQRAGIEIFVVVVGRQVNEPHIRVLVTGKTAEYDVAYGESHLFRVPSYQALLRGVFHQTVSRKVALG

SEQ ID NO: 171 - protein, 1806 aa, Homo sapiens
MATRVEVGSITPLTAVPGLGEMGKEETLTRTYFLQAGEASGAPPARILEAKSPLRSPARLLPLPRLAPKPFSKEQDVKSPVPSLRPSSTGPSPSGGLSEEPAAKDLDNRMPGLVGQEVGSGEGPRTSSPLFNKAVFLRPSSSTMILFETTKSGPALGKAVSEGAEEAKLGVSGSRPEVAAKPALPTQKPAGTLPRSAPLSQDTKPPVPQEEAGQDHPPSKASSVEDTARPLVEPRPRLKRRPVSAIFTESIQPQKPGPGAAATVGKVPPTPPEKTWVRKPRPLSMDLTARFENKEALLRKVADEGSGPTAGDMAGLERPRAASKLDRDCLVKAEAPLHDPDLDFLEVAKKIRERKEKMLSKPEMGSPRALVGGSSGVTPSNDQSPWEEKAKLDPEPEKAAESPSPRLGRGLELAEVKSRVADGEAAAGGEWASRRSVRKCISLFREDSTLALAVGSESPLATPASPSAAPEPEKGVVSVQERIRGWTAESSEAKPEVRRRTFQARPLSADLTKLFSSSASSNEVKYEKSAELSGEFPKEPREKQKEGHSLDGACIPRSPWKPGTLRDKSRQTEQKVSSNQDPDSCRGGSSVEAPCPSDVTPEDDRSFQTVWATVFEHHVERHTVADQSGRCLSTTPPGDMAHARVSEPRPRPEMGSWLGRDPPDMTKLKKENSRGFDNPETEKLGPTTLLNGELRPYHTPLRDKYPLSENHNNNTFLKHLENPPTSQRIEPRYDIVHAVGERVHSEAISPAPEEKAVTLRSLRSWLSLKDRQLSQEVTPADLECGLEGQAGSVQRASLIWEARGMPEASGPKFGGNCPFPKWTGGAVVSSHKATVAVSEEHCAPGATSVRAIKAAIWESQHEGPEGARSKPGVGARGPPQGCPLDPLSRATNGPSDSQARTHPDAFAVQKGPFIVAAREGDPGPAQVPQPAVRMRKAGAMDQRMDRWRRRTLPPNVKFDTFSSLVPEDSPHVGHRRTDYVSPTASALRKPQLSHYRVETQEVNPGASRDQTSPAVKQGSPVEPKATFFAVTYQIPNTQKAKGVVLSGAESLLEHSRKITPPSSPHSLTSTLVSLGHEEALEMAGSKNWMKGREHENASILKTLKPTDRPSSLGAWSLDPFNGRIIDVDALWSHRGSEDGPRPQSNWKESANKMSPSGGAPQTTPTLRSRPKDLPVRRKTDVISDTFPGKIRDGYRSSVLDIDALMAEYQELSLKVPGEAQERRSPTVEPSTLPRERPVQLGGVEQRRRSLKEMPDTGGLWKPASSAEINHSFTPGLGKQLAETLETAMGTKSSPPFWALPPSAPSERYPGGSPIPADPRKKTGFAEDDRKAFASKHHVAKCQNYLAESKPSGREDPGSGVRVSPKSPPTDQKKGTPRKSTGRGEEDSVAQWGDHPRDCGRVPLDIKRAYSEKGPPANIREGLSIMHEARERRREQPKGRPSLTGENLEAKMGPCWWESGTGDSHKVLPRDLEKEDAPQEKERPLQQVSPVASVPWRSHSFCKDRRSGPFVDQLKQCFSRQPTEPKDTDTLVHEAGSQYGTWTEQCQSGESLATESPDSSATSTRKQPPSSRLSSLSSQTEPTSAGDQYDCSRDQRSTSVDHSSTDLESTDGMEGPPPPDACPEKRVDDFSFIDQTSVLDSSALKTRVQLSKRSRRRAPISHSLRRSRFSESESRSPLEDETDNTWMFKDSTEEKSPRKEESDEEETASKAERTPVSHPQRMPAFPGMDPAVLKAQLHKRPEVDSPGETPSWAPQPKSPKSPFQPGVLGSRVLPSSMDKDERSDEPSPQWLKELKSKKRQSLYENQV

SEQ ID NO: 172 - protein, 3298 aa, Homo sapiens
MQKELGIVPSCPGMKSPRPHLLLPLLLLLLLLLGAGVPGAWGQAGSLDLQIDEEQPAGTLIGDISAGLPAGTAAPLMYFISAQEGSGVGTDLAIDEHSGVVRTARVLDREQRDRYRFTAVTPDGATVEVTVRVADINDHAPAFPQARAALQVPEHTAFGTRYPLEPARDADAGRLGTQGYALSGDGAGETFRLETRPGPDGTPVPELVVTGELDRENRSHYMLQLEAYDGGSPPRRAQALLDVTLLDINDHAPAFNQSRYHAVVSESLAPGSPVLQVFASDADAGVNGAVTYEINRRQSEGDGPFSIDAHTGLLQLERPLDFEQRRVHELVVQARDGGAHPELGSAFVTVHVRDANDNQPSMTVIFLSADGSPQVSEAAPPGQLVARISVSDPDDGDFAHVNVSLEGGEGHFALSTQDSVIYLVCVARRLDREERDAYNLRVTATDSGSPPLRAEAAFVLHVTDVNDNAPAFDRQLYRPEPLPEVALPGSFVVRVTARDPDQGTNGQVTYSLAPGAHTHWFSIDPTSGIITTAASLDYELEPQPQLIVVATDGGLPPLASSATVSVALQDVNDNEPQFQRTFYNASLPEGTQPGTCFLQVTATDADSGPFGLLSYSLGAGLGSSGSPPFRIDAHSGDVCTTRTLDRDQGPSSFDFTVTAVDGGGLKSMVYVKVFLSDENDNPPQFYPREYAASISAQSPPGTAVLRLRAHDPDQGSHGRLSYHILAGNSPPLFTLDEQSGLLTVAWPLARRANSVVQLEIGAEDGGGLQAEPSARVDISIVPGTPTPPIFEQLQYVFSVPEDVAPGTSVGIVQAHNPPGRLAPVTLSLSGGDPRGLFSLDAVSGLLQTLRPLDRELLGPVLELEVRAGSGVPPAFAVARVRVLLDDVNDNSPAFPAPEDTVLLPPNTAPGTPIYTLRALDPDSGVNSRVTFTLLAGGGGAFTVDPTTGHVRLMRPLGPSGGPAHELELEARDGGSPPRTSHFRLRVVVQDVGTRGLAPRFNSPTYRVDLPSGTTAGTQVLQVQAQAPDGGPITYHLAAEGASSPFGLEPQSGWLWVRAALDREAQELYILKVMAVSGSKAELGQQTGTATVRVSILNQNEHSPRLSEDPTFLAVAENQPPGTSVGRVFATDRDSGPNGRLTYSLQQLSEDSKAFRIHPQTGEVTTLQTLDREQQSSYQLLVQVQDGGSPPRSTTGTVHVAVLDLNDNSPTFLQASGAAGGGLPIQVPDRVPPGTLVTTLQAKDPDEGENGTILYTLTGPGSELFSLHPHSGELLTAAPLIRAERPHYVLTLSAHDQGSPPRSASLQLLVQVLPSARLAEPPPDLAERDPAAPVPVVLTVTAAEGLRPGSLLGSVAAPEPAGVGALTYTLVGGADPEGTFALDAASGRLYLARPLDFEAGPPWRALTVRAEGPGGAGARLLRVQVQVQDENEHAPAFARDPLALALPENPEPGAALYTFRASDADGPGPNSDVRYRLLRQEPPVPALRLDARTGALSAPRGLDRETTPALLLLVEATDRPANASRRRAARVSARVFVTDENDNAPVFASPSRVRLPEDQPPGPAALHVVARDPDLGEAARVSYRLASGGDGHFRLHSSTGALSVVRPLDREQRAEHVLTVVASDHGSPPRSATQVLTVSVADVNDEAPTFQQQEYSVLLRENNPPGTSLLTLRATDPDVGANGQVTYGGVSSESFSLDPDTGVLTTLRALDREEQEEINLTVYAQDRGSPPQLTHVTVRVAVEDENDHAPTFGSAHLSLEVPEGQDPQTLTMLRASDPDVGANGQLQYRILDGDPSGAFVLDLASGEFGTMRPLDREVEPAFQLRIEARDGGQPALSATLLLTVTVLDANDHAPAFPVPAYSVEVPEDVPAGTLLLQLQAHDPDAGANGHVTYYLGAGTAGAFLLEPSSGELRTAAALDREQCPSYTFSVSAVDGAAAGPLSTTVSVTITVRDVNDHAPTFPTSPLRLRLPRPGPSFSTPTLALATLRAEDRDAGANASILYRLAGTPPPGTTVDSYTGEIRVARSPVALGPRDRVLFIVATDLGRPARSATGVIIVGLQGEAERGPRFPRASSEATIRENAPPGTPIVSPRAVHAGGTNGPITYSILSGNEKGTFSIQPSTGAITVRSAEGLDFEVSPRLRLVLQAESGGAFAFTVLTLTLQDANDNAPRFLRPHYVAFLPESRPLEGPLLQVEADDLDQGSGGQISYSLAASQPARGLFHVDPTTGTITTTAILDREIWAETRLVLMATDRGSPALVGSATLTVMVIDTNDNRPTIPQPWELRVSEDALLGSEIAQVTGNDVDSGPVLWYVLSPSGPQDPFSVGRYGGRVSLTGPLDFEQCDRYQLQLLAHDGPHEGRANLTVLVEDVNDNAPAFSQSLYQVMLLEHTPPGSAILSVSATDRDSGANGHISYHLASPADGFSVDPNNGTLFTIVGTVALGHDGSGAVDVVLEARDHGAPGRAARATVHVQLQDQNDHAPSFTLSHYRVAVTEDLPPGSTLLTLEATDADGSRSHAAVDYSIISGNWGRVFQLEPRLAEAGESAGPGPRALGCLVLLEPLDFESLTQYNLTVAAADRGQPPQSSVVPVTVTVLDVNDNPPVFTRASYRVTVPEDTPVGAELLHVEASDADPGPHGLVRFTVSSGDPSGLFELDESSGTLRLAHALDCETQARHQLVVQAADPAGAHFALAPVTIEVQDVNDHGPAFPLNLLSTSVAENQPPGTLVTTLHAIDGDAGAFGRLRYSLLEAGPGPEGREAFALNSSTGELRARVPFDYEHTESFRLLVGAADAGNLSASVTVSVLVTGEDEYDPVFLAPAFHFQVPEGARRGHSLGHVQATDEDGGADGLVLYSLATSSPYFGINQTTGALYLRVDSRAPGSGTATSGGGGRTRREAPRELRLEVIARGPLPGSRSATVPVTVDITHTALGLAPDLNLLLVGAVAASLGVVVVLALAALVLGLVRARSRKAEAAPGPMSQAAPLASDSLQKLGREPPSPPPSEHLYHQTLPSYGGPGAGGPYPRGGSLDPSHSSGRGSAEAAEDDEIRMINEFPRVASVASSLAARGPDSGIQQDADGLSDTSCEPPAPDTWYKGRKAGLLLPGAGATLYREEGPPATATAFLGGCGLSPAPTGDYGFPADGKPCVAGALTAIVAGEEELRGSYNWDYLLSWCPQFQPLASVFTEIARLKDEARPCPPAPRIDPPPLITAVAHPGAKSVPPKPANTAAARAIFPPASHRSPISHEGSLSSAAMSPSFSPSLSPLAARSPVVSPFGVAQGPSASALSAESGLEPPDDTELHI

SEQ ID NO: 173 - protein, 4753 aa, Homo sapiens
MVPEERRVGLSSDETSSDSLKSWHSICVLDSKEQPLACQQKQRQFVKPVTESEQPTVLELLLAELRTLFSAVLQDSSPAAWRYLHAVLGLLPPYRELLVGHLDLLPFLEQLYCWAPWVQTHLHLDLLGAIVQAFPPDSSLLDSASHADCCPQKRRLHHRPPCPACPFVQAQWSRQQVKEELATWLRPLTLPELQRCLGIVGAQVALEEAVWLDGLSLLPLALAADIPVRYESSDTDNAEVEPVGRKETRSQLDYEVPREKAFQKSSTGFSPETSFLDSQVMTALKMERYLKKIHFLYLNVAPSRYFRPYSLMVVPPDKVNPEHYIFSPFGILHVHPVEGSETMTLGTWHHHCVLWQQLQFIPFFKYCLLRKSFTCWKKNVRLQGLHRLQKFLENHLLLAVPHFGAGLLHISRLLQELHSVSWLPQELDRCYELLDLQTALAEEKHKALRLLHRCLNLCTSILRLVHEDTYHMQQCLQERVQNCDRIRTGQGSIYLQRVQHKQLEQKLKQAEAWWLQLGKFARLVDYMICQSLISVLEEQITSFVANILQAPRQKPFLSSQLVFDDHGQLSHVPCVENMIQTLTGGLQSVKTSALQVVQSADLKTSSDSLYSEEEDEEEDSKDEFLMPKFQGQPSDAVSIFCGPNVGLVWPWKSHPIAGILEVRGCRLRGQYFPHNYKQLEEDLDNNPKIQQALNIQQVLLEGVLCKVQEFCREHHWITGIYEFLQSWGPQKLEDMRGGPIKNYVTLVSRLNVWQARVSSMPIELLTKGGLLLLSCHDVQAEMESKLNSIRKDILAHVQNECWNLSQQLMTELTDFMHIFRTINSDIHAIAQCTQKLNEANEQYVELEERMEYVRALHELIRNHFSLFSAENEALDISVRRQFGESPIPPCPPPPQPHLLHCPLLAPQLLDMWEAFQFEKSQASEFLLSKRHAIMPKLQQLMAAALAELEGLLAKALSGPFMDPTQDQRSTEHQLVSLERQFQNTVSDLSELHHAYAIFTEDETPVPLPICGTRPIVQQQRIWHLYRVISENISEWKCMAFAKFSPAMAQEKTEGWLTEAARMSTTLELHSPVLQHCMRILGEFRSYLPLLTKLGSLHPQSLNCQCLLRALGLGSLQTIELLTLGQLLTYPLLEFADRINQVWQNENERIHAQETIRRLQRYWEARQLRLLNFILHVPYEPPASERSKRQVLRSPQWEVVDKDSGTFILSDYSNLQDSIQESLQVLSKILAIEKSGDLNKIALEWVAIMHGLGALLEVWLTFQQKWIFLNKVLHEMKIQFPNADLNSRFKVMDDQYRTLMRISVADPMVLSLVVPSAERSPYFQGQQLQQLLQAGSVELEGIIMSLESVLYGVCAHFPRLFFLSDSELVALLAARLESCEAQLWVRRCFPHVHAVSFRSCPTGEKNTDDWESSPNTQTQVEALAVLGAGGEEVKLQGPLPLHPDLPKWLASLEKCLRLALVHMLQGCVAARLARGPSLGEALKQLPKQNKLYLQLYVQHWIDLVQAFPWQCVLVAEEVVWRAEMEEALLEWGTLAMVSMHMRKLEVLVNFMRAQRASQGGQSLPSVRQTSLLSALLVMAVTHRDIAQLLEQHQVSDLTDFHWVRQLKYHLGSPHIIPKSPLQSLKTIASSEPSLSPAACWIDVLGRSFLYNYEYLGPRLGPLPSLLPERPALVLLLALEEVACGTVLGPNGVGKRAIVNSLAQALGRQLVMLPCSPQIEAQCLSNYLNGALQGGAWLLLEKVHQLPPGLLSALGQRLGELHHLYAPLYQEASRNTSTIDPTQPQLLGSSFFEKHHVSVRLGYGCLLVLRALSSAVPANLHLLLRPVALALPDLRQVAELTLLGAGMRDAFQMATRLSKFFSLERELVSGPLPCRLPLLKQILEDTIRTLNVTKEEPKCQKPRSLAAIEEAALLRSPLFSILNGLHLHNLRGLLCALFPSASQVLAEPMTYKLMKPLVVEELQQVGLDPSPDILGSLEQLSQALSRASGILLLGPAGSGKTTCWHSLFKIQNRLAAMEDTSTQGCQPVEITHLYPSGLSPQEFLGWLEGSCWHHGIFPKVLRAAGQCNNMGQKRQTEESIGIQHWIICDGASNGAWLDSITCLLSELPQLSLPSGQQIARPPGTFLLMEVADTTGISPTVVGCCALVWCGGEQTWQCILSALMASLPYEYRLQHRTVAELNHMAEVLVPATLRFLTCQGVSSLLQVHGQQAVCAGVAEVTSMARILHSLLDLHLRLKEEKAPGPEDLSYSDPVAQSFRSSKSSFLNRSQVDSDDVPDKCREHLLAVSSFLFALIWGFGAHLPSRFWPIFDTFIRDSISRLSNYPEPPPSALVFDLHVSPEDGTLVPFTGQYLSSHIKGTLGTFHPSIQTERLLYVVDLLLSGGQPVLLAGEAATGKSAFVEVLVEPHHPYIYSPIHPAFSSSHLRLLLSRGIQGQTQASPQPGHHQDSKPSLLFLLEDLHLATSDPEKSCQPVLETLRQAMDGTVYAHSTLELQTLQPTVNFLATVTVPGYCERPLCPRLFRLFTVLALESMTQATLLERHVPIIQAWLERFPSVERERALARGLVRASVEAWEAVCNCFMPSPLHPHYHFSLHSVSHLLSSLQLLPNRTGSRGFVDYPNHQEHLRRVSGLRGTCLTVMMATRNVVRLWLHEAQRTFCDRLDSPRERSYCAKLLLVVAQSVFCCGPGPQHLGKDHQESEEEEEEERVPEVESEGELAQWEDFSNSNSETEEEEEPYGLQVARVSNSRDPSLTPSIGPVSRGMKESISHKIRQEKGTRASNYRLQVRRSFKTWWQKKPQMDLISPLLLPVLLLHPQEKPSDLVFSQELILGPNSETPNLYLERQWEKLEEQLATSAAQLKLSPHLARCHSMAQHVARLVRVLARPRQHGLLLSGALGTGRHTAITLASSICQAHFFHLPSGSEEAILQCLRDASWHAGMLSQPVALLVPSGVDLTTLHRLLALATSGSFPGQYTEADLDRIGEHLPRENLGVKQNIKKEMVLQRFHQQVCSHLHLFFLIGDKQAHKQLPSTLFLRLLQLATASIDRYEPWDQAALAKVAQHHLEGAQSVPLDDGSWKYPDLQASIPSVAKAMALIHLSATHYHEHLCPALPLVTPKTFLDFLDTFLMLQQQTILKIKNKAQRVQNALENLRMLIKEHGTHANLIFDLEQQLKDSGKSLSMFQQQLEQSKLLYKQQLEECRHQENLIENLARQRDALQAQREAFLEQMSKAFLEPLSQLQVADFEEIRSYRAPPESVVRVTDAMCDLFHHETGWASAKQLLCTEDFYQELVFFPKEKITDSELIKLHLILKAPGMDDAALRAVSRPAASLAAWLWAVLHYGLAHCRGLPTDLLLQQVEATLTREQARLGYYQFQAQETLEHNLALAKMVEDAQASHNCVAKTLSQAQCGQYHKWPMKAALLTPMRAWTTQLQKLKGRCMTVFGDTLLCSAAIIYLGPFPPLRRQELLDEWLALCRGFQEALGPDDVAQALKRKQKSVSIPPKNPLLATHSPFSILSLLSSESEQYQWDGNLKPQAKSAHLAGLLLRSPTHYSSCRWPLLLDPSNEALIWLDPLPLEENRSFAPALTEGRGKGLMRNQKRESKTDMKEEDDESEESNEAEDQTKEQKAEERKNEQEKEQEENEEKEEEKTESQGSKPAYETQLPSLPYLSVLSGADPELGSQLQEAAACGLPVLLTNVELGLGCEELQWLLQREQLSPPQVQPGFCLYLSTTLSLCAMEKVLGCELLKGLNVLDLGLNMEILEEQMLHEILCREYPELETRWQDLKIRALDTCKAVEAAEERLLTMLLFQNPKRQKPAKFLRNIVRAQGKLCQLRAHCEELEGQKLQEMVLWAPYRPVVWHGMAMVKALSQLQNLLPLFCMSPENWLAVTKQALDSMKPREINHGEDLASHLLQLRAHLTRQLLGSTVTALGLTQVPLVGALGALALLQATGKASELERLALWPGLAASPSTVHSKPVSDVARPAWLGPKAWHECEMLELLPPFVGLCASLAGHSSAWQAYLSLSSTVLGPAPGPGPEPLSLLQKLILWRVLRPECLAGALADFTTSLLGRPLDENTYAPTMPFKHSQATQPMLILLPPPGHPSATLHPLTVIQKLAAKYQQGQKQLQVIALGSEAWDPVSVVVSTLSQAMYEGHWLVLDNCHLMPHWPKELLQLLLELLGRAKVVADLESEQLLDQPESRNVSTVHRDFRLWLIVPAESSASLPAVLTQHSMPVFWNQSLELGHVLIDSVELAQQVLYMQPPTQALPLLLLHGLLLHRQLYGTRLQAHRGRWSQVTLTQVLQTQDQLWASLSNPRAAMQELAASVFYGGPLGDTEDREALISLTQACLSPSSGSWVQPHTPQSLLATLMPLPELRELDAMAECKAQMHLLPSPPEPRLCGLSEGPQAWLLRRQSRALLSALQRSSPVWVPESRRGAQLAERRLRQRLVQVNRRLESLQDLLTHVIRQDESDAPWSVLGPNARRPLEGVLETEALELSQLVGTLQRDLDCLLQQLKGAPPCPSRRCAAVAHALWTGRLPLPWRPHAPAGPQPPWHWLRQLSRRGQLLVRYLGVGADASSDVPERVFHLSAFRHPRRLLLALRGEAALDQNVPSSNFPGSRGSVSSQLQYKRLEMNSNPLHFRVENGPNPTVPERGLLLIGLQVLHAEWDPIAGALQDSPSSQPSPLPPVSISTQAPGTSDLPAPADLTVYSCPVYMGGPLGTAKLQSRNIVMHLPLPTKLTPNTCVQRRVHVCSPPLS

SEQ ID NO: 174 - protein, 3753 aa, Homo sapiens
MVLESVVADLLNRFLGDYVENLNKSQLKLGIWGGNVALDNLQIKENALSELDVPFKVKAGQIDKLTLKIPWKNLYGEAVVATLEGLYLLVVPGASIKYDAVKEEKSLQDVKQKELSRIEEALQKAAEKGTHSGEFIYGLENFVYKDIKPGRKRKKHKKHFKKPFKGLDRSKDKPKEAKKDTFVEKLATQVIKNVQVKITDIHIKYEDDVTDPKRPLSFGVTLGELSLLTANEHWTPCILNEADKIIYKLIRLDSLSAYWNVNCSMSYQRSREQILDQLKNEILTSGNIPPNYQYIFQPISASAKLYMNPYAESELKTPKLDCNIEIQNIAIELTKPQYLSMIDLLESVDYMVRNAPYRKYKPYLPLHTNGRRWWKYAIDSVLEVHIRRYTQMWSWSNIKKHRQLLKSYKIAYKNKLTQSKVSEEIQKEIQDLEKTLDVFNIILARQQAQVEVIRSGQKLRKKSADTGEKRGGWFSGLWGKKESKKKDEESLIPETIDDLMTPEEKDKLFTAIGYSESTHNLTLPKQYVAHIMTLKLVSTSVTIRENKNIPEILKIQIIGLGTQVSQRPGAQALKVEAKLEHWYITGLRQQDIVPSLVASIGDTTSSLLKIKFETNPEDSPADQTLIVQSQPVEVIYDAKTVNAVVEFFQSNKGLDLEQITSATLMKLEEIKERTATGLTHIIETRKVLDLRINLKPSYLVVPQTGFHHEKSDLLILDFGTFQLNSKDQGLQKTTNSSLEEIMDKAYDKFDVEIKNVQLLFARAEETWKKCRFQHPSTMHILQPMDIHVELAKAMVEKDIRMARFKVSGGLPLMHVRISDQKMKDVLYLMNSIPLPQKSSAQSPERQVSSIPIISGGTKGLLGTSLLLDTVESESDDEYFDAEDGEPQTCKSMKGSELKKAAEVPNEELINLLLKFEIKEVILEFTKQQKEEDTILVFNVTQLGTEATMRTFDLTVVSYLKKISLDYHEIEGSKRKPLHLISSSDKPGLDLLKVEYIKADKNGPSFQTAFGKTEQTVKVAFSSLNLLLQTQALVASINYLTTIIPSDDQSISVAKEVQISTEKQQKNSTLPKAIVSSRDSDIIDFRLFAKLNAFCVIVCNEKNNIAEIKIQGLDSSLSLQSRKQSLFARLENIIVTDVDPKTVHKKAVSIMGNEVFRFNLDLYPDATEGDLYTDMSKVDGVLSLNVGCIQIVYLHKFLMSLLNFLNNFQTAKESLSAATAQAAERAATSVKDLAQRSFRVSINIDLKAPVIVIPQSSISTNAVVVDLGLIRVHNQFSLVSDEDYLNPPVIDRMDVQLTKLTLYRTVIQPGIYHPDIQLLHPINLEFLVNRNLAASWYHKVPVVEIKGHLDSMNVSLNQEDLNLLFRILTENLCEGTEDLDKVKPRVQETGEIKEPLEISISQDVHDSKNTLTTGVEEIRSVDIINMLLNFEIKEVVVTLMKKSEKKGRPLHELNVLQLGMEAKVKTYDMTAKAYLKKISMQCFDFTDSKGEPLHIINSSNVTDEPLLKMLLTKADSDGPEFKTIHDSTKQRLKVSFASLDLVLHLEALLSFMDFLSSAAPFSEPSSSEKESELKPLVGESRSIAVKAVSSNISQKDVFDLKITAELNAFNVFVCDQKCNIADIKIHGMDASISVKPKQTDVFARLKDIIVMNVDLQSIHKKAVSILGDEVFRFQLTLYPDATEGEAYADMSKVDGKLSFKVGCIQIVYVHKFFMSLLNFLNNFQTAKEALSTATVQAAERAASSMKDLAQKSFRLLMDINLKAPVIIIPQSSVSPNAVIADLGLIRVENKFSLVPMEHYSLPPVIDKMNIELTQLKLSRTILQASLPQNDIEILKPVNMLLSIQRNLAAAWYVQIPGMEIKGKLKPMQVALSEDDLTVLMKILLENLGEASSQPSPTQSVQETVRVRKVDVSSVPDHLKEQEDWTDSKLSMNQIVSLQFDFHFESLSIILYNNDINQESGVAFHNDSFQLGELRLHLMASSGKMFKDGSMNVSVKLKTCTLDDLREGIERATSRMIDRKNDQDNNSSMIDISYKQDKNGSQIDAVLDKLYVCASVEFLMTVADFFIKAVPQSPENVAKETQILPRQTATGKVKIEKDDSVRPNMTLKAMITDPEVVFVASLTKADAPALTASFQCNLSLSTSKLEQMMEASVRDLKVLACPFLREKRGKNITTVLQPCSLFMEKCTWASGKQNINIMVKEFIIKISPIILNTVLTIMAALSPKTKEDGSKDTSKEMENLWGIKSINDYNTWFLGVDTATEITESFKGIEHSLIEENCGVVVESIQVTLECGLGHRTVPLLLAESKFSGNIKNWTSLMAAVADVTLQVHYYNEIHAVWEPLIERVEGKRQWNLRLDVKKNPVQDKSLLPGDDFIPEPQMAIHISSGNTMNITISKSCLNVFNNLAKGFSEGTASTFDYSLKDRAPFTVKNAVGVPIKVKPNCNLRVMGFPEKSDIFDVDAGQNLELEYASMVPSSQGNLSILSRQESSFFTLTIVPHGYTEVANIPVARPGRRLYNVRNPNASHSDSVLVQIDATEGNKVITLRSPLQIKNHFSIAFIIYKFVKNVKLLERIGIARPEEEFHVPLDSYRCQLFIQPAGILEHQYKESTTYISWKEELHRSREVRCMLQCPSVEVSFLPLIVNTVALPDELSYICTHGEDWDVAYIIHLYPSLTLRNLLPYSLRYLLEGTAETHELAEGSTADVLHSRISGEIMELVLVKYQGKNWNGHFRIRDTLPEFFPVCFSSDSTEVTTVDLSVHVRRIGSRMVLSVFSPYWLINKTTRVLQYRSEDIHVKHPADFRDIILFSFKKKNIFTKNKVQLKISTSAWSSSFSLDTVGSYGCVKCPANNMEYLVGVSIKMSSFNLSRIVTLTPFCTIANKSSLELEVGEIASDGSMPTNKWNYIASSECLPFWPESLSGKLCVRVVGCEGSSKPFFYNRQDNGTLLSLEDLNGGILVDVNTAEHSTVITFSDYHEGSAPALIMNHTPWDILTYKQSGSPEEMVLLPRQARLFAWADPTGTRKLTWTYAANVGEHDLLKDGCGQFPYDANIQIHWVSFLDGRQRVLLFTDDVALVSKALQAEEMEQADYEITLSLHSLGLSLVNNESKQEVSYIGITSSGVVWEVKPKQKWKPFSQKQIILLEQSYQKHQISRDHGWIKLDNNFEVNFDKDPMEMRLPIRSPIKRDFLSGIQIEFKQSSHQRSLRARLYWLQVDNQLPGAMFPVVFHPVAPPKSIALDSEPKPFIDVSVITRFNEYSKVLQFKYFMVLIQEMALKIDQGFLGAIIALFTPTTDPEAERRRTKLIQQDIDALNAELMETSMTDMSILSFFEHFHISPVKLHLSLSLGSGGEESDKEKQEMFAVHSVNLLLKSIGATLTDVDDLIFKLAYYEIRYQFYKRDQLIWSVVRHYSEQFLKQMYVLVLGLDVLGNPFGLIRGLSEGVEALFYEPFQGAVQGPEEFAEGLVIGVRSLFGHTVGGAAGVVSRITGSVGKGLAAITMDKEYQQKRREELSRQPRDFGDSLARGGKGFLRGVVGGVTGIITKPVEGAKKEGAAGFFKGIGKGLVGAVARPTGGIVDMASSTFQGIQRAAESTEEVSSLRPPRLIHEDGIIRPYDRQESEGSDLLENHIKKLEGETYRYHCAIPGSKKTILMVTNRRVLCIKEVEILGLMCVDWQCPFEDFVFPPSVSENVLKISVKEQGLFHKKDSANQGCVRKVYLKDTATAERACNAIEDAQSTRQQQKLMKQSSVRLLRPQLPS

SEQ ID NO: 175 - protein, 2677 aa, Homo sapiens
MSTCCWCTPGGASTIDFLKRYASNTPSGEFQTADEDLCYCLECVAEYHKARDELPFLHEVLWELETLRLINHFEKSMKAEIGDDDELYIVDNNGEMPLFDITGQDFENKLRVPLLEILKYPYLLLHERVNELCVEALCRMEQANCSFQVFDKHPGIYLFLVHPNEMVRRWAILTARNLGKVDRDDYYDLQEVLLCLFKVIELGLLESPDIYTSSVLEKGKLILLPSHMYDTTNYKSYWLGICMLLTILEEQAMDSLLLGSDKQNDFMQSILHTMEREADDDSVDPFWPALHCFMVILDRLGSKVWGQLMDPIVAFQTIINNASYNREIRHIRNSSVRTKLEPESYLDDMVTCSQIVYNYNPEKTKKDSGWRTAICPDYCPNMYEEMETLASVLQSDIGQDMRVHNSTFLWFIPFVQSLMDLKDLGVAYIAQVVNHLYSEVKEVLNQTDAVCDKVTEFFLLILVSVIELHRNKKCLHLLWVSSQQWVEAVVKCAKLPTTAFTRSSEKSSGNCSKGTAMISSLSLHSMPSNSVQLAYVQLIRSLLKEGYQLGQQSLCKRFWDKLNLFLRGNLSLGWQLTSQETHELQSCLKQIIRNIKFKAPPCNTFVDLTSACKISPASYNKEESEQMGKTSRKDMHCLEASSPTFSKEPMKVQDSVLIKADNTIEGDNNEQNYIKDVKLEDHLLAGSCLKQSSKNIFTERAEDQIKISTRKQKSVKEISSYTPKDCTSRNGPERGCDRGIIVSTRLLTDSSTDALEKVSTSNEDFSLKDDALAKTSKRKTKVQKDEICAKLSHVIKKQHRKSTLVDNTINLDENLTVSNIESFYSRKDTGVQKGDGFIHNLSLDPSGVLDDKNGEQKSQNNVLPKEKQLKNEELVIFSFHENNCKIQEFHVDGKELIPFTEMTNASEKKSSPFKDLMTVPESRDEEMSNSTSVIYSNLTREQAPDISPKSDTLTDSQIDRDLHKLSLLAQASVITFPSDSPQNSSQLQRKVKEDKRCFTANQNNVGDTSRGQVIIISDSDDDDDERILSLEKLTKQDKICLEREHPEQHVSTVNSKEEKNPVKEEKTETLFQFEESDSQCFEFESSSEVFSVWQDHPDDNNSVQDGEKKCLAPIANTTNGQGCTDYVSEVVKKGAEGIEEHTRPRSISVEEFCEIEVKKPKRKRSEKPMAEDPVRPSSSVRNEGQSDTNKRDLVGNDFKSIDRRTSTPNSRIQRATTVSQKKSSKLCTCTEPIRKVPVSKTPKKTHSDAKKGQNRSSNYLSCRTTPAIVPPKKFRQCPEPTSTAEKLGLKKGPRKAYELSQRSLDYVAQLRDHGKTVGVVDTRKKTKLISPQNLSVRNNKKLLTSQELQMQRQIRPKSQKNRRRLSDCESTDVKRAGSHTAQNSDIFVPESDRSDYNCTGGTEVLANSNRKQLIKCMPSEPETIKAKHGSPATDDACPLNQCDSVVLNGTVPTNEVIVSTSEDPLGGGDPTARHIEMAALKEGEPDSSSDAEEDNLFLTQNDPEDMDLCSQMENDNYKLIELIHGKDTVEVEEDSVSRPQLESLSGTKCKYKDCLETTKNQGEYCPKHSEVKAADEDVFRKPGLPPPASKPLRPTTKIFSSKSTSRIAGLSKSLETSSALSPSLKNKSKGIQSILKVPQPVPLIAQKPVGEMKNSCNVLHPQSPNNSNRQGCKVPFGESKYFPSSSPVNILLSSQSVSDTFVKEVLKWKYEMFLNFGQCGPPASLCQSISRPVPVRFHNYGDYFNVFFPLMVLNTFETVAQEWLNSPNRENFYQLQVRKFPADYIKYWEFAVYLEECELAKQLYPKENDLVFLAPERINEEKKDTERNDIQDLHEYHSGYVHKFRRTSVMRNGKTECYLSIQTQENFPANLNELVNCIVISSLVTTQRKLKAMSLLGSRNQLARAVLNPNPMDFCTKDLLTTTSERIIAYLRDFNEDQKKAIETAYAMVKHSPSVAKICLIHGPPGTGKSKTIVGLLYRLLTENQRKGHSDENSNAKIKQNRVLVCAPSNAAVDELMKKIILEFKEKCKDKKNPLGNCGDINLVRLGPEKSINSEVLKFSLDSQVNHRMKKELPSHVQAMHKRKEFLDYQLDELSRQRALCRGGREIQRQELDENISKVSKERQELASKIKEVQGRPQKTQSIIILESHIICCTLSTSGGLLLESAFRGQGGVPFSCVIVDEAGQSCEIETLTPLIHRCNKLILVGDPKQLPPTVISMKAQEYGYDQSMMARFCRLLEENVEHNMISRLPILQLTVQYRMHPDICLFPSNYVYNRNLKTNRQTEAIRCSSDWPFQPYLVFDVGDGSERRDNDSYINVQEIKLVMEIIKLIKDKRKDVSFRNIGIITHYKAQKTMIQKDLDKEFDRKGPAEVDTVDAFQGRQKDCVIVTCVRANSIQGSIGFLASLQRLNVTITRAKYSLFILGHLRTLMENQHWNQLIQDAQKRGAIIKTCDKNYRHDAVKILKLKPVLQRSLTHPPTIAPEGSRPQGGLPSSKLDSGFAKTSVAASLYHTPSDSKEITLTVTSKDPERPPVHDQLQDPRLLKRMGIEVKGGIFLWDPQPSSPQHPGATPPTGEPGFPVVHQDLSHIQQPAAVVAALSSHKPPVRGEPPAASPEASTCQSKCDDPEEELCHRREARAFSEGEQEKCGSETHHTRRNSRWDKRTLEQEDSSSKKRKLL

SEQ ID NO: 176 - protein, 4655 aa, Homo sapiens
MDRGPAAVACTLLLALVACLAPASGQECDSAHFRCGSGHCIPADWRCDGTKDCSDDADEIGCAVVTCQQGYFKCQSEGQCIPNSWVCDQDQDCDDGSDERQDCSQSTCSSHQITCSNGQCIPSEYRCDHVRDCPDGADENDCQYPTCEQLTCDNGACYNTSQKCDWKVDCRDSSDEINCTEICLHNEFSCGNGECIPRAYVCDHDNDCQDGSDEHACNYPTCGGYQFTCPSGRCIYQNWVCDGEDDCKDNGDEDGCESGPHDVHKCSPREWSCPESGRCISIYKVCDGILDCPGREDENNTSTGKYCSMTLCSALNCQYQCHETPYGGACFCPPGYIINHNDSRTCVEFDDCQIWGICDQKCESRPGRHLCHCEEGYILERGQYCKANDSFGEASIIFSNGRDLLIGDIHGRSFRILVESQNRGVAVGVAFHYHLQRVFWTDTVQNKVFSVDINGLNIQEVLNVSVETPENLAVDWVNNKIYLVETKVNRIDMVNLDGSYRVTLITENLGHPRGIAVDPTVGYLFFSDWESLSGEPKLERAFMDGSNRKDLVKTKLGWPAGVTLDMISKRVYWVDSRFDYIETVTYDGIQRKTVVHGGSLIPHPFGVSLFEGQVFFTDWTKMAVLKANKFTETNPQVYYQASLRPYGVTVYHSLRQPYATNPCKDNNGGCEQVCVLSHRTDNDGLGFRCKCTFGFQLDTDERHCIAVQNFLIFSSQVAIRGIPFTLSTQEDVMVPVSGNPSFFVGIDFDAQDSTIFFSDMSKHMIFKQKIDGTGREILAANRVENVESLAFDWISKNLYWTDSHYKSISVMRLADKTRRTVVQYLNNPRSVVVHPFAGYLFFTDWFRPAKIMRAWSDGSHLLPVINTTLGWPNGLAIDWAASRLYWVDAYFDKIEHSTFDGLDRRRLGHIEQMTHPFGLAIFGEHLFFTDWRLGAIIRVRKADGGEMTVIRSGIAYILHLKSYDVNIQTGSNACNQPTHPNGDCSHFCFPVPNFQRVCGCPYGMRLASNHLTCEGDPTNEPPTEQCGLFSFPCKNGRCVPNYYLCDGVDDCHDNSDEQLCGTLNNTCSSSAFTCGHGECIPAHWRCDKRNDCVDGSDEHNCPTHAPASCLDTQYTCDNHQCISKNWVCDTDNDCGDGSDEKNCNSTETCQPSQFNCPNHRCIDLSFVCDGDKDCVDGSDEVGCVLNCTASQFKCASGDKCIGVTNRCDGVFDCSDNSDEAGCPTRPPGMCHSDEFQCQEDGICIPNFWECDGHPDCLYGSDEHNACVPKTCPSSYFHCDNGNCIHRAWLCDRDNDCGDMSDEKDCPTQPFRCPSWQWQCLGHNICVNLSVVCDGIFDCPNGTDESPLCNGNSCSDFNGGCTHECVQEPFGAKCLCPLGFLLANDSKTCEDIDECDILGSCSQHCYNMRGSFRCSCDTGYMLESDGRTCKVTASESLLLLVASQNKIIADSVTSQVHNIYSLVENGSYIVAVDFDSISGRIFWSDATQGKTWSAFQNGTDRRVVFDSSIILTETIAIDWVGRNLYWTDYALETIEVSKIDGSHRTVLISKNLTNPRGLALDPRMNEHLLFWSDWGHHPRIERASMDGSMRTVIVQDKIFWPCGLTIDYPNRLLYFMDSYLDYMDFCDYNGHHRRQVIASDLIIRHPYALTLFEDSVYWTDRATRRVMRANKWHGGNQSVVMYNIQWPLGIVAVHPSKQPNSVNPCAFSRCSHLCLLSSQGPHFYSCVCPSGWSLSPDLLNCLRDDQPFLITVRQHIIFGISLNPEVKSNDAMVPIAGIQNGLDVEFDDAEQYIYWVENPGEIHRVKTDGTNRTVFASISMVGPSMNLALDWISRNLYSTNPRTQSIEVLTLHGDIRYRKTLIANDGTALGVGFPIGITVDPARGKLYWSDQGTDSGVPAKIASANMDGTSVKTLFTGNLEHLECVTLDIEEQKLYWAVTGRGVIERGNVDGTDRMILVHQLSHPWGIAVHDSFLYYTDEQYEVIERVDKATGANKIVLRDNVPNLRGLQVYHRRNAAESSNGCSNNMNACQQICLPVPGGLFSCACATGFKLNPDNRSCSPYNSFIVVSMLSAIRGFSLELSDHSETMVPVAGQGRNALHVDVDVSSGFIYWCDFSSSVASDNAIRRIKPDGSSLMNIVTHGIGENGVRGIAVDWVAGNLYFTNAFVSETLIEVLRINTTYRRVLLKVTVDMPRHIVVDPKNRYLFWADYGQRPKIERSFLDCTNRTVLVSEGIVTPRGLAVDRSDGYVYWVDDSLDIIARIRINGENSEVIRYGSRYPTPYGITVFENSIIWVDRNLKKIFQASKEPENTEPPTVIRDNINWLRDVTIFDKQVQPRSPAEVNNNPCLENNGGCSHLCFALPGLHTPKCDCAFGTLQSDGKNCAISTENFLIFALSNSLRSLHLDPENHSPPFQTINVERTVMSLDYDSVSDRIYFTQNLASGVGQISYATLSSGIHTPTVIASGIGTADGIAFDWITRRIYYSDYLNQMINSMAEDGSNRTVIARVPKPRAIVLDPCQGYLYWADWDTHAKIERATLGGNFRVPIVNSSLVMPSGLTLDYEEDLLYWVDASLQRIERSTLTGVDREVIVNAAVHAFGLTLYGQYIYWTDLYTQRIYRANKYDGSGQIAMTTNLLSQPRGINTVVKNQKQQCNNPCEQFNGGCSHICAPGPNGAECQCPHEGNWYLANNRKHCIVDNGERCGASSFTCSNGRCISEEWKCDNDNDCGDGSDEMESVCALHTCSPTAFTCANGRCVQYSYRCDYYNDCGDGSDEAGCLFRDCNATTEFMCNNRRCIPREFICNGVDNCHDNNTSDEKNCPDRTCQSGYTKCHNSNICIPRVYLCDGDNDCGDNSDENPTYCTTHTCSSSEFQCASGRCIPQHWYCDQETDCFDASDEPASCGHSERTCLADEFKCDGGRCIPSEWICDGDNDCGDMSDEDKRHQCQNQNCSDSEFLCVNDRPPDRRCIPQSWVCDGDVDCTDGYDENQNCTRRTCSENEFTCGYGLCIPKIFRCDRHNDCGDYSDERGCLYQTCQQNQFTCQNGRCISKTFVCDEDNDCGDGSDELMHLCHTPEPTCPPHEFKCDNGRCIEMMKLCNHLDDCLDNSDEKGCGINECHDPSISGCDHNCTDTLTSFYCSCRPGYKLMSDKRTCVDIDECTEMPFVCSQKCENVIGSYICKCAPGYLREPDGKTCRQNSNIEPYLIFSNRYYLRNLTIDGYFYSLILEGLDNVVALDFDRVEKRLYWIDTQRQVIERMFLNKTNKETIINHRLPAAESLAVDWVSRKLYWLDARLDGLFVSDLNGGHRRMLAQHCVDANNTFCFDNPRGLALHPQYGYLYWADWGHRAYIGRVGMDGTNKSVIISTKLEWPNGITIDYTNDLLYWADAHLGYIEYSDLEGHHRHTVYDGALPHPFAITIFEDTIYWTDWNTRTVEKGNKYDGSNRQTLVNTTHRPFDIHVYHPYRQPIVSNPCGTNNGGCSHLCLIKPGGKGFTCECPDDFRTLQLSGSTYCMPMCSSTQFLCANNEKCIPIWWKCDGQKDCSDGSDELALCPQRFCRLGQFQCSDGNCTSPQTLCNAHQNCPDGSDEDRLLCENHHCDSNEWQCANKRCIPESWQCDTFNDCEDNSDEDSSHCASRTCRPGQFRCANGRCIPQAWKCDVDNDCGDHSDEPIEECMSSAHLCDNFTEFSCKTNYRCIPKWAVCNGVDDCRDNSDEQGCEERTCHPVGDFRCKNHHCIPLRWQCDGQNDCGDNSDEENCAPRECTESEFRCVNQQCIPSRWICDHYNDCGDNSDERDCEMRTCHPEYFQCTSGHCVHSELKCDGSADCLDASDEADCPTRFPDGAYCQATMFECKNHVCIPPYWKCDGDDDCGDGSDEELHLCLDVPCNSPNRFRCDNNRCIYSHEVCNGVDDCGDGTDETEEHCRKPTPKPCTEYEYKCGNGHCIPHDNVCDDADDCGDWSDELGCNKGKERTCAENICEQNCTQLNEGGFICSCTAGFETNVFDRTSCLDINECEQFGTCPQHCRNTKGSYECVCADGFTSMSDRPGKRCAAEGSSPLLLLPDNVRIRKYNLSSERFSEYLQDEEYIQAVDYDWDPKDIGLSVVYYTVRGEGSRFGAIKRAYIPNFESGRNNLVQEVDLKLKYVMQPDGIAVDWVGRHIYWSDVKNKRIEVAKLDGRYRKWLISTDLDQPAAIAVNPKLGLMFWTDWGKEPKIESAWMNGEDRNILVFEDLGWPTGLSIDYLNNDRIYWSDFKEDVIETIKYDGTDRRVIAKEAMNPYSLDIFEDQLYWISKEKGEVWKQNKFGQGKKEKTLVVNPWLTQVRIFHQLRYNKSVPNLCKQICSHLCLLRPGGYSCACPQGSSFIEGSTTECDAAIELPINLPPPCRCMHGGNCYFDETDLPKCKCPSGYTGKYCEMAFSKGISPGTTAVAVLLTILLIVVIGALAIAGFFHYRRTGSLLPALPKLPSLSSLVKPSENGNGVTFRSGADLNMDIGVSGFGPETAIDRSMAMSEDFVMEMGKQPIIFENPMYSARDSAVKVVQPIQVTVSENVDNKNYGSPINPSEIVPETNPTSPAADGTQVTKWNLFKRKSKQTTNFENPIYAQMENEQKESVAATPPPSPSLPAKPKPPSRRDPTPTYSATEDTFKDTANLVKEDSEV

SEQ ID NO: 177 - protein, 2610 aa, Homo sapiens
MADVDPDTLLEWLQMGQGDERDMQLIALEQLCMLLLMSDNVDRCFETCPPRTFLPALCKIFLDESAPDNVLEVTARAITYYLDVSAECTRRIVGVDGAIKALCNRLVVVELNNRTSRDLAEQCVKVLELICTRESGAVFEAGGLNCVLTFIRDSGHLVHKDTLHSAMAVVSRLCGKMEPQDSSLEICVESLSSLLKHEDHQVSDGALRCFASLADRFTRRGVDPAPLAKHGLTEELLSRMAAAGGTVSGPSSACKPGRSTTGAPSTTADSKLSNQVSTIVSLLSTLCRGSPVVTHDLLRSELPDSIESALQGDERCVLDTMRLVDLLLVLLFEGRKALPKSSAGSTGRIPGLRRLDSSGERSHRQLIDCIRSKDTDALIDAIDTGAFEVNFMDDVGQTLLNWASAFGTQEMVEFLCERGADVNRGQRSSSLHYAACFGRPQVAKTLLRHGANPDLRDEDGKTPLDKARERGHSEVVAILQSPGDWMCPVNKGDDKKKKDTNKDEEECNEPKGDPEMAPIYLKRLLPVFAQTFQQTMLPSIRKASLALIRKMIHFCSEALLKEVCDSDVGHNLPTILVEITATVLDQEDDDDGHLLALQIIRDLVDKGGDIFLDQLARLGVISKVSTLAGPSSDDENEEESKPEKEDEPQEDAKELQQGKPYHWRDWSIIRGRDCLYIWSDAAALELSNGSNGWFRFILDGKLATMYSSGSPEGGSDSSESRSEFLEKLQRARGQVKPSTSSQPILSAPGPTKLTVGNWSLTCLKEGEIAIHNSDGQQATILKEDLPGFVFESNRGTKHSFTAETSLGSEFVTGWTGKRGRKLKSKLEKTKQKVRTMARDLYDDHFKAVESMPRGVVVTLRNIATQLESSWELHTNRQCIESENTWRDLMKTALENLIVLLKDENTISPYEMCSSGLVQALLTVLNNSMDLDMKQDCSQLVERINVFKTAFSENEDDESRPAVALIRKLIAVLESIERLPLHLYDTPGSTYNLQILTRRLRFRLERAPGETALIDRTGRMLKMEPLATVESLEQYLLKMVAKQWYDFDRSSFVFVRKLREGQNFIFRHQHDFDENGIIYWIGTNAKTAYEWVNPAAYGLVVVTSSEGRNLPYGRLEDILSRDNSALNCHSNDDKNAWFAIDLGLWVIPSAYTLRHARGYGRSALRNWVFQVSKDGQNWTSLYTHVDDCSLNEPGSTATWPLDPPKDEKQGWRHVRIKQMGKNASGQTHYLSLSGFELYGTVNGVCEDQLGKAAKEAEANLRRQRRLVRSQVLKYMVPGARVIRGLDWKWRDQDGSPQGEGTVTGELHNGWIDVTWDAGGSNSYRMGAEGKFDLKLAPGYDPDTVASPKPVSSTVSGTTQSWSSLVKNNCPDKTSAAAGSSSRKGSSSSVCSVASSSDISLGSTKTERRSEIVMEHSIVSGADVHEPIVVLSSAENVPQTEVGSSSSASTSTLTAETGSENAERKLGPDSSVRTPGESSAISMGIVSVSSPDVSSVSELTNKEAASQRPLSSSASNRLSVSSLLAAGAPMSSSASVPNLSSRETSSLESFVRRVANIARTNATNNMNLSRSSSDNNTNTLGRNVMSTATSPLMGAQSFPNLTTPGTTSTVTMSTSSVTSSSNVATATTVLSVGQSLSNTLTTSLTSTSSESDTGQEAEYSLYDFLDSCRASTLLAELDDDEDLPEPDEEDDENEDDNQEDQEYEEVMILRRPSLQRRAGSRSDVTHHAVTSQLPQVPAGAGSRPIGEQEEEEYETKGGRRRTWDDDYVLKRQFSALVPAFDPRPGRTNVQQTTDLEIPPPGTPHSELLEEVECTPSPRLALTLKVTGLGTTREVELPLTNFRSTIFYYVQKLLQLSCNGNVKSDKLRRIWEPTYTIMYREMKDSDKEKENGKMGCWSIEHVEQYLGTDELPKNDLITYLQKNADAAFLRHWKLTGTNKSIRKNRNCSQLIAAYKDFCEHGTKSGLNQGAISTLQSSDILNLTKEQPQAKAGNGQNSCGVEDVLQLLRILYIVASDPYSRISQEDGDEQLQFTFPPDEFTSKKITTKILQQIEEPLALASGALPDWCEQLTSKCPFLIPFETRQLYFTCTAFGASRAIVWLQNRREATVERTRTTSSVRRDDPGEFRVGRLKHERVKVPRGESLMEWAENVMQIHADRKSVLEVEFLGEEGTGLGPTLEFYALVAAEFQRTDLGAWLCDDNFPDDESRHVDLGGGLKPPGYYVQRSCGLFTAPFPQDSDELERITKLFHFLGIFLAKCIQDNRLVDLPISKPFFKLMCMGDIKSNMSKLIYESRGDRDLHCTESQSEASTEEGHDSLSVGSFEEDSKSEFILDPPKPKPPAWFNGILTWEDFELVNPHRARFLKEIKDLAIKRRQILSNKGLSEDEKNTKLQELVLKNPSGSGPPLSIEDLGLNFQFCPSSRIYGFTAVDLKPSGEDEMITMDNAEEYVDLMFDFCMHTGIQKQMEAFRDGFNKVFPMEKLSSFSHEEVQMILCGNQSPSWAAEDIINYTEPKLGYTRDSPGFLRFVRVLCGMSSDERKAFLQFTTGCSTLPPGGLANLHPRLTVVRKVDATDASYPSVNTCVHYLKLPEYSSEEIMRERLLAATMEKGFHLN

SEQ ID NO: 178 - protein, 148 aa, Homo sapiens
MKLLVLAVLLTVAAADSGISPRAVWQFRKMIKCVIPGSDPFLEYNNYGCYCGLGGSGTPVDELDKCCQTHDNCYDQAKKLDSCKFLLDNPYTHTYSYSCSGSAITCSSKNKECEAFICNCDRNAAICFSKAPYNKAHKNLDTKKYCQS

SEQ ID NO: 179 - protein, 4243 aa, Homo sapiens
MGHLWLLGIWGLCGLLLCAADPSTDGSQIIPKVTEIIPKYGSINGATRLTIRGEGFSQANQFNYGVDNAELGNSVQLISSFQSITCDVEKDASHSTQITCYTRAMPEDSYTVRVSVDGVPVTENNTCKGHINSWECTFNAKSFRTPTIRSITPLSGTPGTLITIQGRIFTDVYGSNIALSSNGKNVRILRVYIGGMPCELLIPQSDNLYGLKLDHPNGDMGSMVCKTTGTFIGHHNVSFILDNDYGRSFPQKMAYFVSSLNKIAMFQTYAEVTMIFPSQGSIRGGTTLTISGRFFDQTDFPVRVLVGGEPCDILNVTENSICCKTPPKPHILKTVYPGGRGLKLEVWNNSRPIRLEEILEYNEKTPGYMGASWVDSASYIWLMEQDTFVARFSGFLVAPDSDVYRFYIKGDDRYAIYFSQTGLPEDKVRIAYHSANANSYFSSPTQRSDDIHLQKGKEYYIEILLQEYRLSAFVDVGLYQYRNVYTEQQTGDAVNEEQVIKSQSTILQEVQVITLENWETTNAINEVQKIKVTSPCVEANSCSLYQYRLIYNMEKTVFLPADASEFILQSALNDLWSIKPDTVQVIRTQNPQSYVYMVTFISTRGDFDLLGYEVVEGNNVTLDITEQTKGKPNLETFTLNWDGIASKPLTLWSSEAEFQGAVEEMVSTKCPPQIANFEEGFVVKYFRDYETDFNLEHINRGQKTAETDAYCGRYSLKNPAVLFDSADVKPNRRPYGDILLFPYNQLCLAYKGFLANYIGLKFQYQDNSKITRSTDTQFTYNFAYGNNWTYTCIDLLDLVRTKYTGTNVSLQRISLHKASESQSFYVDVVYIGHTSTISTLDEMPKRRLPALANKGIFLEHFQVNQTKTNGPTMTNQYSVTMTSYNCSYNIPMMAVSFGQIITHETENEFVYRGNNWPGESKIHIQRIQAASPPLSGSFDIQAYGHILKGLPAAVSAADLQFALQSLEGMGRISVTREGTCAGYAWNIKWRSTCGKQNLLQINDSNIIGEKANMTVTRIKEGGLFRQHVLGDLLRTPSQQPQVEVYVNGIPAKCSGDCGFTWDSNITPLVLAISPSQGSYEEGTILTIVGSGFSPSSAVTVSVGPVGCSLLSVDEKELKCQILNGSAGHAPVAVSMADVGLAQNVGGEEFYFVYQSQISHIWPDSGSIAGGTLLTLSGFGFNENSKVLVGNETCNVIEGDLNRITCRTPKKTEGTVDISVTTNGFQATARDAFSYNCLQTPIITDFSPKVRTILGEVNLTIKGYNFGNELTQNMAVYVGGKTCQILHWNFTDIRCLLPKLSPGKHDIYVEVRNWGFASTRDKLNSSIQYVLEVTSMFPQRGSLFGGTEITIRGFGFSTIPAENTVLLGSIPCNVTSSSENVIKCILHSTGNIFRITNNGKDSVHGLGYAWSPPVLNVSVGDTVAWHWQTHPFLRGIGYRIFSVSSPGSVIYDGKGFTSGRQKSTSGSFSYQFTSPGIHYYSSGYVDEAHSIFLQGVINVLPAETRHIPLHLFVGRSEATYAYGGPENLHLGSSVAGCLATEPLCSLNNTRVKNSKRLLFEVSSCFSPSISNITPSTGTVNELITIIGHGFSNLPWANKVTIGSYPCVVEESSEDSITCHIDPQNSMDVGIRETVTLTVYNLGTAINTLSNEFDRRFVLLPNIDLVLPNAGSTTGMTSVTIKGSGFAVSSAGVKVLMGHFPCKVLSVNYTAIECETSPAAQQLVDVDLLIHGVPAQCQGNCTFSYLESITPYITGVFPNSVIGSVKVLIEGEGLGTVLEDIAVFIGNQQFRAIEVNENNITALVTPLPVGHHSVSVVVGSKGLALGNLTVSSPPVASLSPTSGSIGGGTTLVITGNGFYPGNTTVTIGDEPCQIISINPNEVYCRTPAGTTGMVDVKIFVNTIAYPPLLFTYALEDTPFLRGIIPSRGPPGTEIEITGSNFGFEILEISVMINNIQCNVTMANDSVVQCIVGDHAGGTFPVMMHHKTKGSAMSTVVFEYPLNIQNINPSQGSFGGGQTMTVTGTGFNPQNSIILVCGSECAIDRLRSDYTTLLCEIPSNNGTGAEQACEVSVVNGKDLSQSMTPFTYAVSLTPLITAVSPKRGSTAGGTRLTVVGSGFSENMEDVHITIAEAKCDVEYSNKTHIICMTDAHTLSGWAPVCVHIRGVGMAKLDNADFLYVDAWSSNFSWGGKSPPEEGSLVVITKGQTILLDQSTPILKMLLIQGGTLIFDEADIELQAENILITDGGVLQIGTETSPFQHKAVITLHGHLRSPELPVYGAKTLAVREGILDLHGVPVPVTWTRLAHTAKAGERILILQEAVTWKPGDNIVIASTGHRHSQGENEKMTIASVSADGINITLSNPLNYTHLGITVTLPDGTLFEARAEVGILTRNILIRGSDNVEWNNKIPACPDGFDTGEFATQTCLQGKFGEEIGSDQFGGCVMFHAPVPGANMVTGRIEYVEVFHAGQAFRLGRYPIHWHLLGDLQFKSYVRGCAIHQAYNRAVTIHNTHHLLVERNIIYDIKGGAFFIEDGIEHGNILQYNLAVFVQQSTSLLNDDVTPAAFWVTNPNNTIRHNAVAGGTHFGFWYRMNNHPDGPSYDRNICQKRVPLGEFFNNTVHSQGWFGMWIFEEYFPMQTGSCTSTVPAPAIFNSLTTWNCQKGAEWVNGGALQFHNFVMVNNYEAGIETKRILAPYVGGWGETNGAVIKNAKIVGHLDELGMGSAFCTAKGLVLPFSEGLTVSSVHFMNFDRPNCVALGVTSISGVCNDRCGGWSAKFVDVQYSHTPNKAGFRWEHEMVMIDVDGSLTGHKGHTVIPHSSLLDPSHCTQEAEWSIGFPGSVCDASVSFHRLAFNQPSPVSLLEKDVVLSDSFGTSIIPFQKKRLTHMSGWMALIPNANHINWYFKGVDHITNISYTSTFYGFKEEDYVIISHNFTQNPDMFNIIDMRNGSSNPLNWNTSKNGDWHLEANTSTLYYLVSGRNDLHQSQLISGNLDPDVKDVVINFQAYCCILQDCFPVHPPSRKPIPKKRPATYNLWSNDSFWQSSRENNYTVPHPGANVIIPEGTWIVADIDMPSMERLIIWGVLELEDKYNVGAAESSYREVVLNATYISLQGGRLIGGWEDNPFKGDLKIVLRGNHTTQDWALPEGPNQGAKVLGVFGELDLHGIPHSIYKTKLSETAFAGSKVLSLMDAVDWQEGEEIVITTTSYDFHQTETRSIVKILHDHKILILNDSLSYTHFAEKYHVPGTGESYTLAADVGILSRNIKIVGEDYPGWSEDSFGARVLVGSFTENMMTFKGNARISNVEFYHSGQEGFRDSTDPRYAVTFLNLGQIQEHGSSYIRGCAFHHGFSPAIGVFGTDGLDIDDNIIHFTVGEGIRIWGNANRVRGNLIALSVWPGTYQNRKDLSSTLWHAAIEINRGTNTVLQNNVVAGFGRAGYRIDGEPCPGQFNPVEKWFDNEAHGGLYGIYMNQDGLPGCSLIQGFTIWTCWDYGIYFQTTESVHIYNVTLVDNGMAIFPMIYMPAAISHKISSKNVQIKSSLIVGSSPGFNCSDVLTNDDPNIELTAAHRSPRSPSGGRSGICWPTFASAHNMAPRKPHAGIMSYNAISGLLDISGSTFVGFKNVCSGETNVIFITNPLNEDLQHPIHVKNIKLVDTTEQSKIFIHRPDISKVNPSDCVDMVCDAKRKSFLRDIDGSFLGNAGSVIPQAEYEWDGNSQVGIGDYRIPKAMLTFLNGSRIPVTEKAPHKGIIRDSTCKYLPEWQSYQCFGMEYAMMVIESLDPDTETRRLSPVAIMGNGYVDLINGPQDHGWCAGYTCQRRLSLFHSIVALNKSYEVYFTGTSPQNLRLMLLNVDHNKAVLVGIFFSTLQRLDVYVNNLLVCPKTTIWNAQQKHCELNNHLYKDQFLPNLDSTVLGENYFDGTYQMLYLLVKGTIPVEIHTATVIFVSFQLSVATEDDFYTSHNLVKNLALFLKIPSDKIRISKIRGKSLRRKRSMGFIIEIEIGDPPIQFISNGTTGQMQLSELQEIAGSLGQAVILGNISSILGFNISSMSITNPLPSPSDSGWIKVTAQPVERSAFPVHHVAFVSSLLVITQPVAAQPGQPFPQQPSVKATDSDGNCVSVGITALTLRAILKDSNNNQVNGLSGNTTIPFSSCWANYTDLTPLRTGKNYKIEFILDNVVGVESRTFSLLAESVSSSGSSSSSNSKASTVGTYAQIMTVVISCLVGRMWLLEIFMAAVSTLNITLRSY

SEQ ID NO: 180 - protein, 3783 aa, Homo sapiens
  MOD_RES (515)..(515): Any amino acid
MCRGKEPLLNTGSVVPPSIREDGRKANVSGMAGQSLTLECDANGFPVPEIVWLKDAQLVGVPLGWAGYGWDLGWGQVGGHRLLDEGQSLHFPRIQEGDSGLYSCRAENQAGTAQRDFHLLVLTPPSVLGAGAAQEVLGLAGADVELQCWTSGVPTPQVEWTKDRQPVLPGGPHLQVQEDGQVLRITGSHVGDEGRYQCVAFSPAGQQARDFQLRVHAPPTIWGSNETGEVAVMEDHLVQLLCEARGVPTPNITWFKDGALLPTSTKVVYTRGGRQLQLGRAQSSDAGVYTCKASNAVGAAEKATRLDVYVPPTIEGAGGRPYVVKAVAGRPVALECVARGHPSPTLSWHHEGLPVAESNESRLETDGSVLRLESPGEASSGLYSCVASSPAGEAVLQYSVEVQVPPQLLVAEGLGQVTTIVGQPLELPCQASGSPVPTIQWLQNGRPAEELAGVQVASQGTTLHIDHVELDHSGLFACQATNEAGTAGAEVEVSVHGEWAPGVLEVPIGQYHWGXEHHSSFPAACDPPVHRGWGAHPKPPLVEGWCSPGSLWGEPTGIPVAYSLPPPLQIEKVDLRDEGIYTCAATNLAGESKREVALKVLVPPNIEPGPVNKAVLENASVTLECLASGVPPPDVSWFKGHQPVSSWMGVTVSVDGRVLRIEQAQLSDAGSYRCVASNVAGSTELRYGLRVNVPPRITLPPSLPGPVLVNTPVRLTCNATGAPSPTLMWLKDGNPVSPAGTPGLQVFPGGRVLTLASARASDSGRYSCVAVSAVGEDRQDVVLQVHMPPSILGEELNVSVVANESVALECQSHAMPPPVLSWWKDGRPLEPRPGVHLSADKALLQVDRADVWDAGHYTCEALNQAGHSEKHYNLNVWVAPVFPLRESHTLTVREGHPTRLSCECRGVPFPKISWRKDGQPLPGEGAGLQHVSAVGRLLYLGQAQLAQEGTYTCECSNVVGNSSQDLQLEVHVPPQIAGPREPPTQVSVVQDGVATLECNATGKPPPTVTWERDGQPVGAELGLQLQNQGQSLHVERAQAAHTGRYSCVAENLAGRAERKFELSVLVPPELIGDLDPLTNITAALHSPLTLLCEAMGIPPPAIRWFRGEEPVSPGEDTYLLAGGWMLKMTQTQEQDSGLYSCLASNEAGEARRNFSVEVLVPPSIENEDLEEVIKVLDGQTAHLMCNVTGHPQPKLTWFKDGRPLARGDAHHISPDGVLLQVLQANLSSAGHYSCIAANAVGEKTKHFQLSVLLAPTILGGAEDSADEEVTVTVNNPISLICEALAFPSPNITWMKDGAPFEASRNIQLLPGTHGLQILNAQKEDAGQYTCVVTNELGEAVKNYHVEVLIPPSISKDDPLAEVGVKEVKTKVNSTLTLECESWAVPPPTIRWYKDGQPVTPSSRLQVLGEGRLLQIQPTQVSDSGRYLCVATNVAGEDDQDFNVLIQVPPMFQKVGDFSAAFEILSREEEARGGVTEYREIVENNPAYLYCDTNAIPPPDLTWYREDQPLSAGDEVSVLQGGRVLQIPLVRAENAGRYSCKASNEVGEDWLHYELLVLTPPVILGDTEELVEEVTVNASSTVSLQCPALGNPVPTISWLQNGLPFSPSPRLQVLEDGQVLQVSTAEVADAASYMCVAENQAGSAEKLFTLRVQVPPRIAGLDLEQVTAILNSSVSLPCDVHAHPNPEVTWYKDSQALSLGEEVFLLPGTHTLQLGRARLSDSGMYTCEALNAAGRDQKLVQLSVLVPPAFRQAPRGPQDAVLVRVGDKAVLSCETDALPEPTVTWYKDGQPLVLAQRTQALRGGQRLEIQEAQVSDKGLYSCKVSNVAGEAVRTFTLTVQVPPTFENPKTETVSQVAGSPLVLTCDVSGVPAPTVTWLKDRMPVESSAVHGVVSRGGRLQLSRLQPAQAGTYTCVAENTQAEARKDFVVAVLVAPRIRSSGVAREHHVLEGQEVRLDCEADGQPPPDVAWLKDGSPLGQDMGPHLRFYLDGGSLVLKGLRASDAGAYTCVAHNPAGEDARLHTVNVLVPPTIKQGADGSGTLVSRPGELVTMVCPVRGSPPIHVSWLKDGLPLPLSQRTLLHGSGHTLRISKVQLADAGIFTCVAASPAGVADRNFTLQVQVPPVLEPVEFQNDVVVVRGSLVELPCEARGVPLPLVSWMKDGEPLLSQSLEQGPSLQLEAVGAGDSGTYSCVAVSEAGEARRHFQLTVMEPPHIEDSGQPTELSLTPGAPMELLCDAQGTPQPNITWHKDGQALTRLENNSRATRVLRVRDAGLYTCLAESPAGAIEKSFRVRVQAPPNIVGPRGPRFVVGLAPGQLVLECSVEAEPAPKITWHRDGIVLQEDAHTQFPERGRFLQLQALSTADSGDYSCTARNAAGSTSVAFRVEIHTVPTIRSGPPAVNVSVNQTALLPCQADGVPAPLVSWRKDRVPLDPRSPRFEILPEGSLRIQPVLAQDAGHYLCLASNSAGSDRQGRDLRVLEPPAIAPSPSNLTLTAHTPALLPCEASGSPKPLVVWWKDGQKLDFRLQQGAYRLLPSNALLLTAPGPQDSAQFECVVSNEVGEAHRLYQVTVHVPPTIADDQTDFTVTMMAPVVLTCHSTGIPAPTVSWSKAGAQLGARGSGYRVSPSGALEIGQALPIHAGRYTCSARNSAGVAHKHVFLTVQASPVVKPLPSVVRAVAEEEVLLPCEASGIPRPTITWQKEGLNVATGVSTQVLPGGQLRIAHASPEDAGNYLCIAKNSAGSAMGKTRLVVQVPPVIENGLPDLSTTEGSHAFLPCKARGSPEPNITWDKDGQPVSGAEGKFTIQPSGELLVKNLEGQDAGTYTCTAENAVGRARRRVHLTILVLPVFTTLPGDRSLRLGDRLWLRCAARGSPTPRIGWTVNDRPVTEGVSEQDGGSTLQRAAVSREDSGTYVCWAENRVGRTQAVSFVHVKEAPVLQGEAFSYLVEPVGGSIQLDCVVRGDPVPDIHWIKDGLPLRGSHLRHQLQNGSLTIRRTERDDAGRYQCLAENEMGVAKKVVILVLQSAPVFQVEPQDMTVRSGDDVALRCQATGEPTPTIEWLQAGQPLRASRRLRTLPDGSLWLENVETGDAGTYDCVAHNLLGSATARAFLVVRGEPQGSWGSMTGVINGRKFGVATLNTSVMQEAHSGVSSIHSSIRHVPANVGPLMRVLVVTIAPIYWALARESGEALNGHSLTGGRFRQESHVEFATGELLTMTQVARGLDPDGLLLLDVVVNGVVPESLADADLQVQDFEEHYVQTGPGQLFVGSTQRFFQGGLPSFLRCNHSIQYNAARGPQPQLVQHLRASAISSAFDPEAEALRFQLATALQAEENEVGCPEGFELDSQGAFCVDRDECSGGPSPCSHACLNAPGRFSCTCPTGFALAWDDRNCRDVDECAWDAHLCREGQRCVNLLGSYRCLPDCGPGFRVADGAGCEDVDECLEGLDDCHYNQLCENTPGGHRCSCPRGYRMQGPSLPCLDVNECLQLPKACAYQCHNLQGSYRCLCPPGQTLLRDGKACTSLERNGQNVTTVSHRGPLLPWLRPWASIPGTSYHAWVSLRPGPMALSSVGRAWCPPGFIRQNGVCTDLDECRVRNLCQHACRNTEGSYQCLCPAGYRLLPSGKNCQDINECEEESIECGPGQMCFNTRGSYQCVDTPCPATYRQGPSPGTCFRRCSQDCGTGGPSTLQYRLLPLPLGVRAHHDVARLTAFSEVGVPANRTELSMLEPDPRSPFALRPLRAGLGAVYTRRALTRAGLYRLTVRAAAPRHQSVFVLLIAVSPYPY

SEQ ID NO: 181 - protein, 2817 aa, Homo sapiens
MKLNPQQAPLYGDCVVTVLLAEEDKAEDDVVFYLVFLGSTLRHCTSTRKVSSDTLETIAPGHDCCETVKVQLCASKEGLPVFVVAEEDFHFVQDEAYDAAQFLATSAGNQQALNFTRFLDQSGPPSGDVNSLDKKLVLAFRHLKLPTEWNVLGTDQSLHDAGPRETLMHFAVRLGLLRLTWFLLQKPGGRGALSIHNQEGATPVSLALERGYHKLHQLLTEENAGEPDSWSSLSYEIPYGDCSVRHHRELDIYTLTSESDSHHEHPFPGDGCTGPIFKLMNIQQQLMKTNLKQMDSLMPLMMTAQDPSSAPETDGQFLPCAPEPTDPQRLSSSEETESTQCCPGSPVAQTESPCDLSSIVEEENTDRSCRKKNKGVERKGEEVEPAPIVDSGTVSDQDSCLQSLPDCGVKGTEGLSSCGNRNEETGTKSSGMPTDQESLSSGDAVLQRDLVMEPGTAQYSSGGELGGISTTNVSTPDTAGEMEHGLMNPDATVWKNVLQGGESTKERFENSNIGTAGASDVHVTSKPVDKISVPNCAPAASSLDGNKPAESSLAFSNEETSTEKTAETETSRSREESADAPVDQNSVVIPAAAKDKISDGLEPYTLLAAGIGEAMSPSDLALLGLEEDVMPHQNSETNSSHAQSQKGKSSPICSTTGDDKLCADSACQQNTVTSSGDLVAKLCDNIVSESESTTARQPSSQDPPDASHCEDPQAHTVTSDPVRDTQERADFCPFKVVDNKGQRKDVKLDKPLTNMLEVVSHPHPVVPKMEKELVPDQAVISDSTFSLANSPGSESVTKDDALSFVPSQKEKGTATPELHTATDYRDGPDGNSNEPDTRPLEDRAVGLSTSSTAAELQHGMGNTSLTGLGGEHEGPAPPAIPEALNIKGNTDSSLQSVGKATLALDSVLTEEGKLLVVSESSAAQEQDKDKAVTCSSIKENALSSGTLQEEQRTPPPGQDTQQFHEKSISADCAKDKALQLSNSPGASSAFLKAETEHNKEVAPQVSLLTQGGAAQSLVPPGASLATESRQEALGAEHNSSALLPCLLPDGSDGSDALNCSQPSPLDVGVKNTQSQGKTSACEVSGDVTVDVTGVNALQGMAEPRRENISHNTQDILIPNVLLSQEKNAVLGLPVALQDKAVTDPQGVGTPEMIPLDWEKGKLEGADHSCTMGDAEEAQIDDEAHPVLLQPVAKELPTDMELSAHDDGAPAGVREVMRAPPSGRERSTPSLPCMVSAQDAPLPKGADLIEEAASRIVDAVIEQVKAAGALLTEGEACHMSLSSPELGPLTKGLESAFTEKVSTFPPGESLPMGSTPEEATGSLAGCFAGREEPEKIILPVQGPEPAAEMPDVKAEDEVDFRASSISEEVAVGSIAATLKMKQGPMTQAINRENWCTIEPCPDAASLLASKQSPECENFLDVGLGRECTSKQGVLKRESGSDSDLFHSPSDDMDSIIFPKPEEEHLACDITGSSSSTDDTASLDRHSSHGSDVSLSQILKPNRSRDRQSLDGFYSHGMGAEGRESESEPADPGDVEEEEMDSITEVPANCSVLRSSMRSLSPFRRHSWGPGKNAASDAEMNHRSMSWCPSGVQYSAGLSADFNYRSFSLEGLTGGAGVGNKPSSSLEVSSANAEELRHPFSGEERVDSLVSLSEEDLESDQREHRMFDQQICHRSKQQGFNYCTSAISSPLTKSISLMTISHPGLDNSRPFHSTFHNTSANLTESITEENYNFLPHSPSKKDSEWKSGTKVSRTFSYIKNKMSSSKKSKEKEKEKDKIKEKEKDSKDKEKDKKTVNGHTFSSIPVVGPISCSQCMKPFTNKDAYTCANCSAFVHKGCRESLASCAKVKMKQPKGSLQAHDTSSLPTVIMRNKPSQPKERPRSAVLLVDETATTPIFANRRSQQSVSLSKSVSIQNITGVGNDENMSNTWKFLSHSTDSLNKISKVNESTESLTDEGVGTDMNEGQLLGDFEIESKQLEAESWSRIIDSKFLKQQKKDVVKRQEVIYELMQTEFHHVRTLKIMSGVYSQGMMADLLFEQQMVEKLFPCLDELISIHSQFFQRILERKKESLVDKSEKNFLIKRIGDVLVNQFSGENAERLKKTYGKFCGQHNQSVNYFKDLYAKDKRFQAFVKKKMSSSVVRRLGIPECILLVTQRITKYPVLFQRILQCTKDNEVEQEDLAQSLSLVKDVIGAVDSKVASYEKKVRLNEIYTKTDSKSIMRMKSGQMFAKEDLKRKKLVRDGSVFLKNAAGRLKEVQAVLLTDILVFLQEKDQKYIFASLDQKSTVISLKKLIVREVAHEEKGLFLISMGMTDPEMVEVHASSKEERNSWIQIIQDTINTLNRDEDEGIPSENEEEKKMLDTRARELKEQLHQKDQKILLLLEEKEMIFRDMAECSTPLPEDCSPTHSPRVLFRSNTEEALKGGPLMKSAINEVEILQGLVSGNLGGTLGPTVSSPIEQDVVGPVSLPRRAETFGGFDSHQMNASKGGEKEEGDDGQDLRRTESDSGLKKGGNANLVFMLKRNSEQVVQSVVHLYELLSALQGVVLQQDSYIEDQKLVLSERALTRSLSRPSSLIEQEKQRSLEKQRQDLANLQKQQAQYLEEKRRREREWEARERELREREALLAQREEEVQQGQQDLEKEREELQQKKGTYQYDLERLRAAQKQLEREQEQLRREAERLSQRQTERDLCQVSHPHTKLMRIPSFFPSPEEPPSPSAPSIAKSGSLDSELSVSPKRNSISRTHKDKGPFHILSSTSQTNKGPEGQSQAPASTSASTRLFGLTKPKEKKEKKKKNKTSRSQPGDGPASEVSAEGEEIFC

SEQ ID NO: 182 - protein, 3169 aa, Homo sapiens
MHSAGTPGLSSRRTGNSTSFQPGPPPPPRLLLLLLLLLSLVSRVPAQPAAFGRALLSPGLAGAAGVPAEEAIVLANRGLRVPFGREVWLDPLHDLVLQVQPGDRCAVSVLDNDALAQRPGRLSPKRFPCDFGPGEVRYSHLGARSPSRDRVRLQLRYDAPGGAVVLPLVLEVEVVFTQLEVVTRNLPLVVEELLGTSNALDARSLEFAFQPETEECRVGILSGLGALPRYGELLHYPQVPGGAREGGAPETLLMDCKAFQELGVRYRHTAASRSPNRDWIPMVVELRSRGAPVGSPALKREHFQVLVRIRGGAENTAPKPSFVAMMMMEVDQFVLTALTPDMLAAEDAESPSDLLIFNLTSPFQPGQGYLVSTDDRSLPLSSFTQRDLRLLKIAYQPPSEDSDQERLFELELEVVDLEGAASDPFAFMVVVKPMNTMAPVVTRNTGLILYEGQSRPLTGPAGSGPQNLVISDEDDLEAVRLEVVAGLRHGHLVILGASSGSSAPKSFTVAELAAGQVVYQHDDRDGSLSDNLVLRMVDGGGRHQVQFLFPITLVPVDDQPPVLNANTGLTLAEGETVPILPLSLSATDMDSDDSLLLFVLESPFLTTGHLLLRQTHPPHEKQELLRGLWRKEGAFYERTVTEWQQQDITEGRLFYRHSGPHSPGPVTDQFTFRVQDNHDPPNQSGLQRFVIRIHPVDRLPPELGSGCPLRMVVQESQLTPLRKKWLRYTDLDTDDRELRYTVTQSPTDTDENHLPAPLGTLVLTDNPSVVVTHFTQAQINHHKIAYRPPGQELGVATRVAQFQFQVEDRAGNVAPGTFTLYLHPVDNQPPEILNTGFTIQEKGHHILSETELHVNDVDTDVAHISFTLTQAPKHGHMRVSGQILHVGGLFHLEDIKQGRVSYAHNGDKSLTDSCSLEVSDRHHVVPITLRVNVRPVDDEVPILSHPTGTLESYLDVLENGATEITANVIKGTNEETDDLMLTFLLEDPPLYGEILVNGIPAEQFTQRDILEGSVVYTHTSGEIGLLPKADSFNLSLSDMSQEWRIGGNTIQGVTIWVTILPVDSQAPEIFVGEQLIVMEGDKSVITSVHISAEDVDSLNDDILCTIVIQPTSGYVENISPAPGSEKSRAGIAISAFNLKDLRQGHINYVQSVHKGVEPVEDRFVFRCSDGINFSERQFFPIVIIPTNDEQPEMFMREFMVMEGMSLVIDTPILNAADADVPLDDLTFTITQFPTHGHIMNQLINGTVLVESFTLDQIIESSSIIYEHDDSETQEDSFVIKLTDGKHSVEKTVLIIVIPVDDETPRMTINNGLEIEIGDTKIINNKILMATDLDSEDKSLVYIIRYGPGHGLLQRRKPTGAFENITLGMNFTQDEVDRNLIQYVHLGQEGIRDLIKFDVTDGINPLIDRYFYVSIGSIDIVFPDVISKGVSLKEGGKVTLTTDLLSTSDLNSPDENLVFTITRAPMRGHLECTDQPGVSITSFTQLQLAGNKIYYIHTADDEVKMDSFEFQVTDGRNPVFRTFRISISDVDNKKPVVTIHKLVVSESENKLITPFELTVEDRDTPDKLLKFTITQVPIHGHLLFNNTRPVMVFTKQDLNENLISYKHDGTESSEDSFSFTVTDGTHTDFYVFPDTVFETRRPQVMKIQVLAVDNSVPQIAVNKGASTLRTLATGHLGFMITSKILKVEDRDSLHISLRFIVTEAPQHGYLLNLDKGNHSITQFTQADIDDMKICYVLREGANATSDMFYFAVEDGGGNKLTYQNFRLNWAWISFEKEYYLVNEDSKFLDVVLKRRGYLGETSFISIGTRDRTAEKDKDFKGKAQKQVQFNPGQTRATWRVRILSDGEHEQSETFQVVLSEPVLAALEFPTVATVEIVDPGDEPTVFIPQSKYSVEEDVGELFIPIRRSGDVSQELMVVCYTQQGTATGTVPTSVLSYSDYISRPEDHTSVVRFDKDEREKLCRIVIIDDSLYEEEETFHVLLSMPMGGRIGSEFPGAQVTIVPDKDDEPIFYFGDVEYSVDESAGYVEVQVWRTGTDLSKSSSVTVRSRKTDPPSADAGTDYVGISRNLDFAPGVNMQPVRVVILDDLGQPALEGIEKFELVLRMPMNAALGEPSKATVSINDSVSDLPKMQFKERIYTGSESDGQIVTMIHRTGDVQYRSSVRCYTRQGSAQVMMDFEERPNTDTSIITFLPGETEKPCILELMDDVLYEEVEELRLVLGTPQSNSPFGAAVGEQNETLIRIRDDADKTVIKFGETKFSVTEPKEPGESVVIRIPVIRQGDTSKVSIVRVHTKDGSATSGEDYHPVSEEIEFKEGETQHVVEIEVTFDGVREMREAFTVHLKPDENMIAEMQLTKAIVYIEEMSSMADVTFPSVPQIVSLLMYDDTSKAKESAEPMSGYPVICITACNPKYSDYDKTGSICASENINDTLTRYRWLISAPAGPDGVTSPMREVDFDTFFTSSKMVTLDSIYFQPGSRVQCAARAVNTNGDEGLELMSPIVTISREEGLCQPRVPGVVGAEPFSAKLRYTGPEDADYTNLIKLTVTMPHIDGMLPVISTRELSNFELTLSPDGTRVGNHKCSNLLDYTEVKTHYGFLTDATKNPEIIGETYPYQYSLSIRGSTTLRFYRNLNLEACLWEFVSYYDMSELLADCGGTIGTDGQVLNLVQSYVTLRVPLYVSYVFHSPVGVGGWQHFDLKSELRLTFVYDTAILWNDGIGSPPEAELQGSLYPTSMRIGDEGRLAVHFKTEAQFHGLFVLSHPASFTSSVIMSADHPGLTFSLRLIRSEPTYNQPVQQWSFVSDFAVRDYSGTYTVKLVPCTAPSHQEYRLPVTCNPREPVTFDLDIRFQQVSDPVAAEFSLNTQMYLLSKKSLWLSDGSMGFGQESDVAFAEGDIIYGRVMVDPVQNLGDSFYCSIEKVFLCTGADGYVPKYSPMNAEYGCLADSPSLLYRFKIVDKAQPETQATSFGNVLFNAKLAVDDPEAILLVNQPGSDGFKVDSTPLFQVALGREWYIHTIYTVRSKDNANRGIGKRSVEYHSLVSQGKPQSTTKSRKKREIRSTPSLAWEIGAENSRGTNIQHIALDRTKRQIPHGRAPPDGILPWELNSPSSAVSLVTVVGGTTVGLLTICLTVIAVLMCRGKESFRGKDAPKGSSSSEPMVPPQSHHNDSSEV

SEQ ID NO: 183 - protein, 3926 aa, Homo sapiens
MGNEVSLEGGAGDGPLPPGGAGPGPGPGPGPGAGKPPSAPAGGGQLPAAGAARSTAVPPVPGPGPGPGPGPGPGSTSRRLDPKEPLGNQRAASPTPKQASATTPGHESPRETRAQGPAGQEADGPRRTLQVDSRTQRSGRSPSVSPDRGSTPTSPYSVPQIAPLPSSTLCPICKTSDLTSTPSQPNFNTCTQCHNKVCNQCGFNPNPHLTQVKEWLCLNCQMQRALGMDMTTAPRSKSQQQLHSPALSPAHSPAKQPLGKPDQERSRGPGGPQPGSRQAETARATSVPGPAQAAAPPEVGRVSPQPPQPTKPSTAEPRPPAGEAPAKSATAVPAGLGATEQTQEGLTGKLFGLGASLLTQASTLMSVQPEADTQGQPAPSKGTPKIVFNDASKEAGPKPLGSGPGPGPAPGAKTEPGARMGPGSGPGALPKTGGTTSPKHGRAEHQAASKAAAKPKTMPKERAICPLCQAELNVGSKSPANYNTCTTCRLQVCNLCGFNPTPHLVEKTEWLCLNCQTKRLLEGSLGEPTPLPPPTSQQPPVGAPHRASGTSPLKQKGPQGLGQPSGPLPAKASPLSTKASPLPSKASPQAKPLRASEPSKTPSSVQEKKTRVPTKAEPMPKPPPETTPTPATPKVKSGVRRAEPATPVVKAVPEAPKGGEAEDLVGKPYSQDASRSPQSLSDTGYSSDGISSSQSEITGVVQQEVEQLDSAGVTGPHPPSPSEIHKVGSSMRPLLQAQGLAPSERSKPLSSGTGEEQKQRPHSLSITPEAFDSDEELEDILEEDEDSAEWRRRREQQDTAESSDDFGSQLRHDYVEDSSEGGLSPLPPQPPARAAELTDEDFMRRQILEMSAEEDNLEEDDTATSGRGLAKHGTQKGGPRPRPEPSQEPAALPKRRLPHNATTGYEELLPEGGSAEATDGSGTLQGGLRRFKTIELNSTGSYGHELDLGQGPDPSLDREPELEMESLTGSPEDRSRGEHSSTLPASTPSYTSGTSPTSLSSLEEDSDSSPSRRQRLEEAKQQRKARHRSHGPLLPTIEDSSEEEELREEEELLREQEKMREVEQQRIRSTARKTRRDKEELRAQRRRERSKTPPSNLSPIEDASPTEELRQAAEMEELHRSSCSEYSPSPSLDSEAEALDGGPSRLYKSGSEYNLPTFMSLYSPTETPSGSSTTPSSGRPLKSAEEAYEEMMRKAELLQRQQGQAAGARGPHGGPSQPTGPRGLGSFEYQDTTDREYGQAAQPAAEGTPASLGAAVYEEILQTSQSIVRMRQASSRDLAFAEDKKKEKQFLNAESAYMDPMKQNGGPLTPGTSPTQLAAPVSFSTPTSSDSSGGRVIPDVRVTQHFAKETQDPLKLHSSPASPSSASKEIGMPFSQGPGTPATTAVAPCPAGLPRGYMTPASPAGSERSPSPSSTAHSYGHSPTTANYGSQTEDLPQAPSGLAAAGRAAREKPLSASDGEGGTPQPSRAYSYFASSSPPLSPSSPSESPTFSPGKMGPRATAEFSTQTPSPAPASDMPRSPGAPTPSPMVAQGTQTPHRPSTPRLVWQESSQEAPFMVITLASDASSQTRMVHASASTSPLCSPTETQPTTHGYSQTTPPSVSQLPPEPPGPPGFPRVPSAGADGPLALYGWGALPAENISLCRISSVPGTSRVEPGPRTPGTAVVDLRTAVKPTPIILTDQGMDLTSLAVEARKYGLALDPIPGRQSTAVQPLVINLNAQEHTFLATATTVSITMASSVFMAQQKQPVVYGDPYQSRLDFGQGGGSPVCLAQVKQVEQAVQTAPYRSGPRGRPREAKFARYNLPNQVAPLARRDVLITQMGTAQSIGLKPGPVPEPGAEPHRATPAELRSHALPGARKPHTVVVQMGEGTAGTVTTLLPEEPAGALDLTGMRPESQLACCDMVYKLPFGSSCTGTFHPAPSVPEKSMADAAPPGQSSSPFYGPRDPEPPEPPTYRAQGVVGPGPHEEQRPYPQGLPGRLYSSMSDTNLAEAGLNYHAQRIGQLFQGPGRDSAMDLSSLKHSYSLGFADGRYLGQGLQYGSVTDLRHPTDLLAHPLPMRRYSSVSNIYSDHRYGPRGDAVGFQEASLAQYSATTAREISRMCAALNSMDQYGGRHGSGGGGPDLVQYQPQHGPGLSAPQSLVPLRPGLLGNPTFPEGHPSPGNLAQYGPAAGQGTAVRQLLPSTATVRAADGMIYSTINTPIAATLPITTQPASVLRPMVRGGMYRPYASGGITAVPLTSLTRVPMIAPRVPLGPTGLYRYPAPSRFPIASSVPPAEGPVYLGKPAAAKAPGAGGPSRPEMPVGAAREEPLPTTTPAAIKEAAGAPAPAPLAGQKPPADAAPGGGSGALSRPGFEKEEASQEERQRKQQEQLLQLERERVELEKLRQLRLQEELERERVELQRHREEEQLLVQRELQELQTIKHHVLQQQQEERQAQFALQREQLAQQRLQLEQIQQLQQQLQQQLEEQKQRQKAPFPAACEAPGRGPPLAAAELAQNGQYWPPLTHAAFIAMAGPEGLGQPREPVLHRGLPSSASDMSLQTEEQWEASRSGIKKRHSMPRLRDACELESGTEPCVVRRIADSSVQTDDEDGESRYLLSRRRRARRSADCSVQTDDEDSAEWEQPVRRRRSRLPRHSDSGSDSKHDATASSSSAAATVRAMSSVGIQTISDCSVQTEPDQLPRVSPAIHITAATDPKVEIVRYISAPEKTGRGESLACQTEPDGQAQGVAGPQLVGPTAISPYLPGIQIVTPGPLGRFEKKKPDPLEIGYQAHLPPESLSQLVSRQPPKSPQVLYSPVSPLSPHRLLDTSFASSERLNKAHVSPQKHFTADSALRQQTLPRPMKTLQRSLSDPKPLSPTAEESAKERFSLYQHQGGLGSQVSALPPNSLVRKVKRTLPSPPPEEAHLPLAGQASPQLYAASLLQRGLTGPTTVPATKASLLRELDRDLRLVEHESTKLRKKQAELDEEEKEIDAKLKYLELGITQRKESLAKDRGGRDYPPLRGLGEHRDYLSDSELNQLRLQGCTTPAGQFVDFPATAAAPATPSGPTAFQQPRFQPPAPQYSAGSGGPTQNGFPAHQAPTYPGPSTYPAPAFPPGASYPAEPGLPNQQAFRPTGHYAGQTPMPTTQSTLFPVPADSRAPLQKPRQTSLADLEQKVPTNYEVIASPVVPMSSAPSETSYSGPAVSSGYEQGKVPEVPRAGDRGSVSQSPAPTYPSDSHYTSLEQNVPRNYVMIDDISELTKDSTSTAPDSQRLEPLGPGSSGRPGKEPGEPGVLDGPTLPCCYARGEEESEEDSYDPRGKGGHLRSMESNGRPASTHYYGDSDYRHGARVEKYGPGPMGPKHPSKSLAPAAISSKRSKHRKQGMEQKISKFSPIEEAKDVESDLASYPPPAVSSSLVSRGRKFQDEITYGLKKNVYEQQKYYGMSSRDAVEDDRIYGGSSRSRAPSAYSGEKLSSHDFSGWGKGYEREREAVERLQKAGPKPSSLSMAHSRVRPPMRSQASEEESPVSPLGRPRPAGGPLPPGGDTCPQFCSSHSMPDVQEHVKDGPRAHAYKREEGYILDDSHCVVSDSEAYHLGQEETDWFDKPRDARSDRFRHHGGHAVSSSSQKRGPARHSYHDYDEPPEEGLWPHDEGGPGRHASAKEHRHGDHGRHSGRHTGEEPGRRAAKPHARDLGRHEARPHSQPSSAPAMPKKGQPGYPSSAEYSQPSRASSAYHHASDSKKGSRQAHSGPAALQSKAEPQAQPQLQGRQAAPGPQQSQSPSSRQIPSGAASRQPQTQQQQQGLGLQPPQQALTQARLQQQSQPTTRGSAPAASQPAGKPQPGPSTATGPQPAGPPRAEQTNGSKGTAKAPQQGRAPQAQPAPGPGPAGVKAGARPGGTPGAPAGQPGADGESVFSKILPGGAAEQAGKLTEAVSAFGKKFSSFW

SEQ ID NO: 184 - protein, 2454 aa, Homo sapiens
MTAEPMSESKLNTLVQKLHDFLAHSSEESEETSSPPRLAMNQNTDKISGSGSNSDMMENSKEEGTSSSEKSKSSGSSRSKRKPSIVTKYVESDDEKPLDDETVNEDASNENSENDITMQSLPKEDGLHGIVSCTACGQQVNHFQKDSIYRHPSLQVLICKNCFKYYMSDDISRDSDGMDEQCRWCAEGGNLICCDFCHNAFCKKCILRNLGRKELSTIMDENNQWYCYICHPEPLLDLVTACNSVFENLEQLLQQNKKKIKVDSEKSNKVYEHTSRFSPKKTSSNCNGEEKKLDDSCSGSVTYSYSALIVPKEMIKKAKKLIETTANMNSSYVKFLKQATDNSEISSATKLRQLKAFKSVLADIKKAHLALEEDLNSEFRAMDAVNKEKNTKEHKVIDAKFETKARKGEKPCALEKKDISKSEAKLSRKQVDSEHMHQNVPTEEQRTNKSTGGEHKKSDRKEEPQYEPANTSEDLDMDIVSVPSSVPEDIFENLETAMEVQSSVDHQGDGSSGTEQEVESSSVKLNISSKDNRGGIKSKTTAKVTKELYVKLTPVSLSNSPIKGADCQEVPQDKDGYKSCGLNPKLEKCGLGQENSDNEHLVENEVSLLLEESDLRRSPRVKTTPLRRPTETNPVTSNSDEECNETVKEKQKLSVPVRKKDKRNSSDSAIDNPKPNKLPKSKQSETVDQNSDSDEMLAILKEVSRMSHSSSSDTDINEIHTNHKTLYDLKTQAGKDDKGKRKRKSSTSGSDFDTKKGKSAKSSIISKKKRQTQSESSNYDSELEKEIKSMSKIGAARTTKKRIPNTKDFDSSEDEKHSKKGMDNQGHKNLKTSQEGSSDDAERKQERETFSSAEGTVDKDTTIMELRDRLPKKQQASASTDGVDKLSGKEQSFTSLEVRKVAETKEKSKHLKTKTCKKVQDGLSDIAEKFLKKDQSDETSEDDKKQSKKGTEEKKKPSDFKKKVIKMEQQYESSSDGTEKLPEREEICHFPKGIKQIKNGTTDGEKKSKKIRDKTSKKKDELSDYAEKSTGKGDSCDSSEDKKSKNGAYGREKKRCKLLGKSSRKRQDCSSSDTEKYSMKEDGCNSSDKRLKRIELRERRNLSSKRNTKEIQSGSSSSDAEESSEDNKKKKQRTSSKKKAVIVKEKKRNSLRTSTKRKQADITSSSSSDIEDDDQNSIGEGSSDEQKIKPVTENLVLSSHTGFCQSSGDEALSKSVPVTVDDDDDDNDPENRIAKKMLLEEIKANLSSDEDGSSDDEPEEGKKRTGKQNEENPGDEEAKNQVNSESDSDSEESKKPRYRHRLLRHKLTVSDGESGEEKKTKPKEHKEVKGRNRRKVSSEDSEDSDFQESGVSEEVSESEDEQRPRTRSAKKAELEENQRSYKQKKKRRRIKVQEDSSSENKSNSEEEEEEKEEEEEEEEEEEEEEEDENDDSKSPGKGRKKIRKILKDDKLRTETQNALKEEEERRKRIAEREREREKLREVIEIEDASPTKCPITTKLVLDEDEETKEPLVQVHRNMVIKLKPHQVDGVQFMWDCCCESVKKTKKSPGSGCILAHCMGLGKTLQVVSFLHTVLLCDKLDFSTALVVCPLNTALNWMNEFEKWQEGLKDDEKLEVSELATVKRPQERSYMLQRWQEDGGVMIIGYEMYRNLAQGRNVKSRKLKEIFNKALVDPGPDFVVCDEGHILKNEASAVSKAMNSIRSRRRIILTGTPLQNNLIEYHCMVNFIKENLLGSIKEFRNRFINPIQNGQCADSTMVDVRVMKKRAHILYEMLAGCVQRKDYTALTKFLPPKHEYVLAVRMTSIQCKLYQYYLDHLTGVGNNSEGGRGKAGAKLFQDFQMLSRIWTHPWCLQLDYISKENKGYFDEDSMDEFIASDSDETSMSLSSDDYTKKKKKGKKGKKDSSSSGSGSDNDVEVIKVWNSRSRGGGEGNVDETGNNPSVSLKLEESKATSSSNPSSPAPDWYKDFVTDADAEVLEHSGKMVLLFEILRMAEEIGDKVLVFSQSLISLDLIEDFLELASREKTEDKDKPLIYKGEGKWLRNIDYYRLDGSTTAQSRKKWAEEFNDETNVRGRLFIISTKAGSLGINLVAANRVIIFDASWNPSYDIQSIFRVYRFGQTKPVYVYRFLAQGTMEDKIYDRQVTKQSLSFRVVDQQQVERHFTMNELTELYTFEPDLLDDPNSEKKKKRDTPMLPKDTILAELLQIHKEHIVGYHEHDSLLDHKEEEELTEEERKAAWAEYEAEKKGLTMRFNIPTGTNLPPVSFNSQTPYIPFNLGALSAMSNQQLEDLINQGREKVVEATNSVTAVRIQPLEDIISAVWKENMNLSEAQVQALALSRQASQELDVKRREAIYNDVLTKQQMLISCVQRILMNRRLQQQYNQQQQQQMTYQQATLGHLMMPKPPNLIMNPSNYQQIDMRGMYQPVAGGMQPPPLQRAPPPMRSKNPGPSQGKSM

SEQ ID NO: 185 - protein, 3336 aa, Homo sapiens
MEVEQEQRRRKVEAGRTKLAHFRQRKTKGDSSHSEKKTAKRKGSAVDASVQEESPVTKEDSALCGGGDICKSTSCDDTPDGAGGAFAAQPEDCDGEKREDLEQLQQKQVNDHPPEQCGMFTVSDHPPEQHGMFTVGDHPPEQRGMFTVSDHPPEQHGMFTVSDHPPEQRGMFTISDHQPEQRGMFTVSDHTPEQRGIFTISDHPAEQRGMFTKECEQECELAITDLESGREDEAGLHQSQAVHGLELEALRLSLSNMHTAQLELTQANLQKEKETALTELREMLNSRRAQELALLQSRQQHELELLREQHAREKEEVVLRCGQEAAELKEKLQSEMEKNAQIVKTLKEDWESEKDLCLENLRKELSAKHQSEMEDLQNQFQKELAEQRAELEKIFQDKNQAERALRNLESHHQAAIEKLREDLQSEHGRCLEDLEFKFKESEKEKQLELENLQASYEDLKAQSQEEIRRLWSQLDSARTSRQELSELHEQLLARTSRVEDLEQLKQREKTQHESELEQLRIYFEKKLRDAEKTYQEDLTLLQQRLQGAREDALLDSVEVGLSCVGLEEKPEKGRKDHVDELEPERHKESLPRFQAELEESHRHQLEALESPLCIQHEGHVSDRCCVETSALGHEWRLEPSEGHSQELPWVHLQGVQDGDLEADTERAARVLGLETEHKVQLSLLQTELKEEIELLKIENRNLYGKLQHETRLKDDLEKVKHNLIEDHQKELNNAKQKTELMKQEFQRKETDWKVMKEELQREAEEKLTLMLLELREKAESEKQTIINKFELREAEMRQLQDQQAAQILDLERSLTEQQGRLQQLEQDLTSDDALHCSQCGREPPTAQDGELAALHVKEDCALQLMLARSRFLEERKEITEKFSAEQDAFLQEAQEQHARELQLLQERHQQQLLSVTAELEARHQAALGELTASLESKQGALLAARVAELQTKHAADLGALETRHLSSLDSLESCYLSEFQTIREEHRQALELLRADFEEQLWKKDSLHQTILTQELEKLKRKHEGELQSVRDHLRTEVSTELAGTVAHELQGVHQGEFGSEKKTALHEKEETLRLQSAQAQPFHQEEKESLSLQLQKKNHQVQQLKDQVLSLSHEIEECRSELEVLQQRRERENREGANLLSMLKADVNLSHSERGALQDALRRLLGLFGETLRAAVTLRSRIGERVGLCLDDAGAGLALSTAPALEETWSDVALPELDRTLSECAEMSSVAEISSHMRESFLMSPESVRECEQPIRRVFQSLSLAVDGLMEMALDSSRQLEEARQIHSRFEKEFSFKNEETAQVVRKHQELLECLKEESAAKAELALELHKTQGTLEGFKVETADLKEVLAGKEDSEHRLVLELESLRRQLQQAAQEQAALREECTRLWSRGEATATDAEAREAALRKEVEDLTKEQSETRKQAEKDRSALLSQMKILESELEEQLSQHRGCAKQAEAVTALEQQVASLDKHLRNQRQFMDEQAAEREHEREEFQQEIQRLEGQLRQAAKPQPWGPRDSQQAPLDGEVELLQQKLREKLDEFNELAIQKESADRQVLMQEEEIKRLEEMNINIRKKVAQLQEEVEKQKNIVKGLEQDKEVLKKQQMSSLLLASTLQSTLDAGRCPEPPSGSPPEGPEIQLEVTQRALLRRESEVLDLKEQLEKMKGDLESKNEEILHLNLKLDMQNSQTAVSLRELEEENTSLKVIYTRSSEIEELKATIENLQENQKRLQKEKAEEIEQLHEVIEKLQHELSLMGPVVHEVSDSQAGSLQSELLCSQAGGPRGQALQGELEAALEAKEALSRLLADQERRHSQALEALQQRLQGAEEAAELQLAELERNVALREAEVEDMASRIQEFEAALKAKEATIAERNLEIDALNQRKAAHSAELEAVLLALARIRRALEQQPLAAGAAPPELQWLRAQCARLSRQLQVLHQRFLRCQVELDRRQARRATAHTRVPGAHPQPRMDGGAKAQVTGDVEASHDAALEPVVPDPQGDLQPVLVTLKDAPLCKQEGVMSVLTVCQRQLQSELLLVKNEMRLSLEDGGKGKEKVLEDCQLPKVDLVAQVKQLQEKLNRLLYSMTFQNVDAADTKSLWPMASAHLLESSWSDDSCDGEEPDISPHIDTCDANTATGGVTDVIKNQAIDACDANTTPGGVTDVIKNWDSLIPDEMPDSPIQEKSECQDMSLSSPTSVLGGSRHQSHTAEAGPRKSPVGMLDLSSWSSPEVLRKDWTLEPWPSLPVTPHSGALSLCSADTSLGDRADTSLPQTQGPGLLCSPGVSAAALALQWAESPPADDHHVQRTAVEKDVEDFITTSFDSQETLSSPPPGLEGKADRSEKSDGSGFGARLSPGSGGPEAQTAGPVTPASISGRFQPLPEAMKEKEVRPKHVKALLQMVRDESHQILALSEGLAPPSGEPHPPRKEDEIQDISLHGGKTQEVPTACPDWRGDLLQVVQEAFEKEQEMQGVELQPRLSGSDLGGHSSLLERLEKIIREQGDLQEKSLEHLRLPDRSSLLSEIQALRAQLRMTHLQNQEKLQHLRTALTSAEARGSQQEHQLRRQVELLAYKVEQEKCIAGDLQKTLSEEQEKANSVQKLLAAEQTVVRDLKSDLCESRQKSEQLSRSLCEVQQEVLQLRSMLSSKENELKAALQELESEQGKGRALQSQLEEEQLRHLQRESQSAKALEELRASLETQRAQSSRLCVALKHEQTAKDNLQKELRIEHSRCEALLAQERSQLSELQKDLAAEKSRTLELSEALRHERLLTEQLSQRTQEACVHQDTQAHHALLQKLKEEKSRVVDLQAMLEKVQQQALHSQQQLEAEAQKHCEALRREKEVSATLKSTVEALHTQKRELRCSLEREREKPAWLQAELEQSHPRLKEQEGRKAARRSAEARQSPAAAEQWRKWQRDKEKLRELELQRQRDLHKIKQLQQTVRDLESKDEVPGSRLHLGSARRAAGSDADHLREQQRELEAMRQRLLSAARLLTSFTSQAVDRTVNDWTSSNEKAVMSLLHTLEELKSDLSRPTSSQKKMAAELQFQFVDVLLKDNVSLTKALSTVTQEKLELSRAVSKLEKLLKHHLQKGCSPSRSERSAWKPDETAPQSSLRRPDPGRLPPAASEEAHTSNVKMEKLYLHYLRAESFRKALIYQKKYLLLLIGGFQDSEQETLSMIAHLGVFPSKAERKITSRPFTRFRTAVRVVIAILRLRFLVKKWQEVDRKGALAQGKAPRPGPRARQPQSPPRTRESPPTRDVPSGHTRDPARGRRLAAAASPHSGGRATPSPNSRLERSLTASQDPEHSLTEYIHHLEVIQQRLGGVLPDSTSKKSCHPMIKQ

SEQ ID NO: 186 - protein, 458 aa, Homo sapiens
MRGLAVLLTVALATLLAPGAGAPVQSQGSQNKLLLVSFDGFRWNYDQDVDTPNLDAMARDGVKARYMTPAFVTMTSPCHFTLVTGKYIENHGVVHNMYYNTTSKVKLPYHATLGIQRWWDNGSVPIWITAQRQGLRAGSFFYPGGNVTYQGVAVTRSRKEGIAHNYKNETEWRANIDTVMAWFTEEDLDLVTLYFGEPDSTGHRYGPESPERREMVRQVDRTVGYLRESIARNHLTDRLNLIITSDHGMTTVDKRAGDLVEFHKFPNFTFRDIEFELLDYGPNGMLLPKEGRLEKVYDALKDAHPKLHVYKKEAFPEAFHYANNPRVTPLLMYSDLGYVIHGRINVQFNNGEHGFDNKDMDMKTIFRAVGPSFRAGLEVEPFESVHVYELMCRLLGIVPEANDGHLATLLPMLHTESALPPDGRPTLLPKGRSALPPSSRPLLVMGLLGTVILLSEVA

SEQ ID NO: 187 - protein, 2430 aa, Homo sapiens
MAPPAHKSILERSENVLMSPWKGKLIVQDRMLCDIALWSTYGAMIPTQLPQELDFKYVMKVSSLKKRLPEAAFRKQNYLEEKVCFQDLCFNLYEVELSNRQGENIDKLTECIKNKQLAIIKCLEDRGFFILLTSSALLSEPDFGGKQMGLHGLHLFRSPLSTGVKDLKVEDDISMKVIPILSTLNCALLETKKSLPEERIHPNTLVKRHFQELYKADRSPSLSVAPQDRMKDPTFLGKLPSGFDLIPPAEKCPSESLTQLNSYFSDPSAYILEVSTALDLLAEHPQSPCVSDGICDAGFSLVMTPDPEFLVSEAEVRKETETKKDSEEMLKAKKRVFPLSPASNLRVQPKRKASMPHMVQSKKVNLCRPFPKRTASRADNSSDSPTTLKLVKGQFPQKRKRGAEVLTAQFVQKTKLDRKNQEAPISKDVPVPTNAKRARKQEKSPVKTVPRAKPPVKKSPQKQRVNIVKGNENPRNRKQLQPVKGETASKLQSEISRGCQEDGISINSVQPENTTAAHNDLPENSIVNYDSQALNMLADLALSSATSSTPVSEARNLHCSSELPQNDVLLSKENSLRGTSDHEYHRGVKTQKGELLPNPSSDRKSNSGSDLTVSQDEESLVPCSQAPAKAQSALTEEMLESSDASQSSSVSVEHSYALLLTEHSKKHLQEREILSPLFPRNGTKSPEAATPVGKVMPFRHQPGLLLQQKPPDDPVVKPKDRPPSARVKKSSCSRIVLSCDDSVKITFKCETEYAFSLDSKYTNNPLEKTVVRALHGPWNTDLPDNVEEVKLLLHMWVALFYSNQNKIIRSSRKVVEHSNPAKYVSINSTLESCELREIEESLGLEKCSADSLLETNEISRAHAAEVSFRDPNCLLPFIKTPLTQGLELCVQNEQKKTFARECDPDTQEDQNFICSYNNEVTGEEAKQESLETSNLVLSGIGSTQTNGPSVPSEEEIVQPLDSTRVASYSGTVTQATFTRTYDGPGSQPVICQSSVYGTLENKVDILDAAVQTKTGTLQDLIQHGSPINNECHPSLERKDDNMGCAVINPEPITLTFEKNAHVPIQTEGVNTADERTTFKKELIKQVSPAASLRHPVSTSENARTQGLRDIPSLVVAGQKGTKYLCASSVGGETLDKAVCSLQKETPLPVSLPSDKTMVMEALSLAKSSSHLSPSEEVRCTQDFLSQTQSLLGLSSEGLLELTQVEVDSSSASTTLGRQCSLNCISSGCHTSGDSLELRKNHKNGPNTENMNLEAFDSVFIKQTSLSVSREVSLELSEEDSDIDLALTISPPTSPREEMPAGEIEQFEEAPFSNLELQDVAEEIGEPEEVALTESREVSSADNVSVYPSVSEEPVENKERKGDNLQPVTLILSKENCTLEIAEEINVTSDFPFDSVIEEVSPASSPEPPVPVKETRPYQAVTPCILKLHGTQCEKSNQISQCESEDLGITEKENVFVGPTHPVGQDNFTQVQQMQVSAEMPLILTDHPGRTGRPTLPGKVTEEIVSSEHDEGLSFSGKVQCYGRELNQPASAAKCTGDFSPSPEKLVKSGNPLQPVSIENRNLDLKHLVLESSEPPFGPRNVIENKSLSDTLVSTTAPSGIVNVSVKQQTSPKSSQNHLFPGDLKTDEGIYLQVKSLTAASVDGAYSTQGCMCSVVPTLCSSSDNATLTHYVRPINAEPAFQAQEIPAGRMASLLKNGEPEAELHKETTGPGTAGPQSNTTSSLKGERKAIHTLQDVSTCETKELLNVGVSSLCAGPYQNTADTKENLSKEPLASFVSESFDTSVCGIATEHVEIENSGEGLRAEAGSETLGRDGEVGVNSDMHYELSGDSDLDLLGDCRNPRLDLEDSYTLRGSYTRKKDVPTDGYESSLNFHNNNQEDWGCSSWVPGMETSLPPGHWTAAVKKEEKCVPPYVQIRDLHGILRTYANFSITKELKDTMRTSHGLRRHPSFSANCGLPSSWTSTWQVADDLTQNTLDLEYLRFAHKLKQTIKNGDSQHSASSANVFPKESPTQISIGAFPSTKISEAPFLHPAPRSRSPLLVTVVESDPRPQGQPRRGYTASSLDSSSSWRERCSHNRDLRNSQRNHTVSFHLNKLKYNSTVKESRNDISLILNEYAEFNKVMKNSNQFIFQDKELNDVSGEATAQEMYLPFPGRSASYEDIIIDVCTNLHVKLRSVVKEACKSTFLFYLVETEDKSFFVRTKNLLRKGGHTEIEPQHFCQAFHRENDTLIIIIRNEDISSHLHQIPSLLKLKHFPSVIFAGVDSPGDVLDHTYQELFRAGGFVISDDKILEAVTLVQLKEIIKILEKLNGNGRWKWLLHYRENKKLKEDERVDSTAHKKNIMLKSFQSANIIELLHYHQCDSRSSTKAEILKCLLNLQIQHIDARFAVLLTDKPTIPREVFENSGILVTDVNNFIENIEKIAAPFRSSYW

SEQ ID NO: 188 - protein, 5183 aa, Homo sapiens
MATSGGEEAAAAAPAPGTPATGADTTPGWEVAVRPLLSASYSAFEMKELPQLVASVIESESEILHHEKQYEPFYSSFVALSTHYITTVCSLIPRNQLQSVAAACKVLIEFSLLRLENPDEACAVSQKHLILLIKGLCTGCSRLDRTEIITFTAMMKSAKLPQTVKTLSDVEDQKELASPVSPELRQKEVQMNFLNQLTSVFNPRTVASQPISTQTLVEGENDEQSSTDQASAIKTKNVFIAQNVASLQELGGSEKLLRVCLNLPYFLRYINRFQDAVLANSFFIMPATVADATAVRNGFHSLVIDVTMALDTLSLPVLEPLNPSRLQDVTVLSLSCLYAGVSVATCMAILHVGSAQQVRTGSTSSKEDDYESDAATIVQKCLEIYDMIGQAISSSRRAGGEHYQNFQLLGAWCLLNSLFLILNLSPTALADKGKEKDPLAALRVRDILSRTKEGVGSPKLGPGKGHQGFGVLSVILANHAIKLLTSLFQDLQVEALHKGWETDGPPAALSIMAQSTSIQRIQRLIDSVPLMNLLLTLLSTSYRKACVLQRQRKGSMSSDASASTDSNTYYEDDFSSTEEDSSQDDDSEPILGQWFEETISPSKEKAAPPPPPPPPPLESSPRVKSPSKQAPGEKGNILASRKDPELFLGLASNILNFITSSMLNSRNNFIRNYLSVSLSEHHMATLASIIKEVDKDGLKGSSDEEFAAALYHFNHSLVTSDLQSPNLQNTLLQQLGVAPFSEGPWPLYIHPQSLSVLSRLLLIWQHKASAQGDPDVPECLKVWDRFLSTMKQNALQGVVPSETEDLNVEHLQMLLLIFHNFTETGRRAILSLFVQIIQELSVNMDAQMRFVPLILARLLLIFDYLLHQYSKAPVYLFEQVQHNLLSPPFGWASGSQDSNSRRATTPLYHGFKEVEENWSKHFSSDAVPHPRFYCVLSPEASEDDLNRLDSVACDVLFSKLVKYDELYAALTALLAAGSQLDTVRRKENKNVTALEACALQYYFLILWRILGILPPSKTYINQLSMNSPEMSECDILHTLRWSSRLRISSYVNWIKDHLIKQGMKAEHASSLLELASTTKCSSVKYDVEIVEEYFARQISSFCSIDCTTILQLHEIPSLQSIYTLDAAISKVQVSLDEHFSKMAAETDPHKSSEITKNLLPATLQLIDTYASFTRAYLLQNFNEEGTTEKPSKEKLQGFAAVLAIGSSRCKANTLGPTLVQNLPSSVQTVCESWNNINTNEFPNIGSWRNAFANDTIPSESYISAVQAAHLGTLCSQSLPLAASLKHTLLSLVRLTGDLIVWSDEMNPPQVIRTLLPLLLESSTESVAEISSNSLERILGPAESDEFLARVYEKLITGCYNILANHADPNSGLDESILEECLQYLEKQLESSQARKAMEEFFSDSGELVQIMMATANENLSAKFCNRVLKFFTKLFQLTEKSPNPSLLHLCGSLAQLACVEPVRLQAWLTRMTTSPPKDSDQLDVIQENRQLLQLLTTYIVRENSQVGEGVCAVLLGTLTPMATEMLANGDGTGFPELMVVMATLASAGQGAGHLQLHNAAVDWLSRCKKYLSQKNVVEKLNANVMHGKHVMILECTCHIMSYLADVTNALSQSNGQGPSHLSVDGEERAIEVDSDWVEELAVEEEDSQAEDSDEDSLCNKLCTFTITQKEFMNQHWYHCHTCKMVDGVGVCTVCAKVCHKDHEISYAKYGSFFCDCGAKEDGSCLALVKRTPSSGMSSTMKESAFQSEPRISESLVRHASTSSPADKAKVTISDGKVADEEKPKKSSLCRTVEGCREELQNQANFSFAPLVLDMLNFLMDAIQTNFQQASAVGSSSRAQQALSELHTVEKAVEMTDQLMVPTLGSQEGAFENVRMNYSGDQGQTIRQLISAHVLRRVAMCVLSSPHGRRQHLAVSHEKGKITVLQLSALLKQADSSKRKLTLTRLASAPVPFTVLSLTGNPCKEDYLAVCGLKDCHVLTFSSSGSVSDHLVLHPQLATGNFIIKAVWLPGSQTELAIVTADFVKIYDLCVDALSPTFYFLLPSSKIRDVTFLFNEEGKNIIVIMSSAGYIYTQLMEEASSAQQGPFYVTNVLEINHEDLKDSNSQVAGGGVSVYYSHVLQMLFFSYCQGKSFAATISRTTLEVLQLFPINIKSSNGGSKTSPALCQWSEVMNHPGLVCCVQQTTGVPLVVMVKPDTFLIQEIKTLPAKAKIQDMVAIRHTACNEQQRTTMILLCEDGSLRIYMANVENTSYWLQPSLQPSSVISIMKPVRKRKTATITTRTSSQVTFPIDFFEHNQQLTDVEFGGNDLLQVYNAQQIKHRLNSTGMYVANTKPGGFTIEISNNNSTMVMTGMRIQIGTQAIERAPSYIEIFGRTMQLNLSRSRWFDFPFTREEALQADKKLNLFIGASVDPAGVTMIDAVKIYGKTKEQFGWPDEPPEEFPSASVSNICPSNLNQSNGTGDSDSAAPTTTSGTVLERLVVSSLEALESCFAVGPIIEKERNKNAAQELATLLLSLPAPASVQQQSKSLLASLHTSRSAYHSHKDQALLSKAVQCLNTSSKEGKDLDPEVFQRLVITARSIAIMRPNNLVHFTESKLPQMETEGMDEGKEPQKQLEGDCCSFITQLVNHFWKLHASKPKNAFLAPACLPGLTHIEATVNALVDIIHGYCTCELDCINTASKIYMQMLLCPDPAVSFSCKQALIRVLRPRNKRRHVTLPSSPRSNTPMGDKDDDDDDDADEKMQSSGIPNGGHIRQESQEQSEVDHGDFEMVSESMVLETAENVNNGNPSPLEALLAGAEGFPPMLDIPPDADDETMVELAIALSLQQDQQGSSSSALGLQSLGLSGQAPSSSSLDAGTLSDTTASAPASDDEGSTAATDGSTLRTSPADHGGSVGSESGGSAVDSVAGEHSVSGRSSAYGDATAEGHPAGPGSVSSSTGAISTTTGHQEGDGSEGEGEGETEGDVHTSNRLHMVRLMLLERLLQTLPQLRNVGGVRAIPYMQVILMLTTDLDGEDEKDKGALDNLLSQLIAELGMDKKDVSKKNERSALNEVHLVVMRLLSVFMSRTKSGSKSSICESSSLISSATAAALLSSGAVDYCLHVLKSLLEYWKSQQNDEEPVATSQLLKPHTTSSPPDMSPFFLRQYVKGHAADVFEAYTQLLTEMVLRLPYQIKKITDTNSRIPPPVFDHSWFYFLSEYLMIQQTPFVRRQVRKLLLFICGSKEKYRQLRDLHTLDSHVRGIKKLLEEQGIFLRASVVTASSGSALQYDTLISLMEHLKACAEIAAQRTINWQKFCIKDDSVLYFLLQVSFLVDEGVSPVLLQLLSCALCGSKVLAALAASSGSSSASSSSAPVAASSGQATTQSKSSTKKSKKEEKEKEKDGETSGSQEDQLCTALVNQLNKFADKETLIQFLRCFLLESNSSSVRWQAHCLTLHIYRNSSKSQQELLLDLMWSIWPELPAYGRKAAQFVDLLGYFSLKTPQTEKKLKEYSQKAVEILRTQNHILTNHPNSNIYNTLSGLVEFDGYYLESDPCLVCNNPEVPFCYIKLSSIKVDTRYTTTQQVVKLIGSHTISKVTVKIGDLKRTKMVRTINLYYNNRTVQAIVELKNKPARWHKAKKVQLTPGQTEVKIDLPLPIVASNLMIEFADFYENYQASTETLQCPRCSASVPANPGVCGNCGENVYQCHKCRSINYDEKDPFLCNACGFCKYARFDFMLYAKPCCAVDPIENEEDRKKAVSNINTLLDKADRVYHQLMGHRPQLENLLCKVNEAAPEKPQDDSGTAGGISSTSASVNRYILQLAQEYCGDCKNSFDELSKIIQKVFASRKELLEYDLQQREAATKSSRTSVQPTFTASQYRALSVLGCGHTSSTKCYGCASAVTEHCITLLRALATNPALRHILVSQGLIRELFDYNLRRGAAAMREEVRQLMCLLTRDNPEATQQMNDLIIGKVSTALKGHWANPDLASSLQYEMLLLTDSISKEDSCWELRLRCALSLFLMAVNIKTPVVVENITLMCLRILQKLIKPPAPTSKKNKDVPVEALTTVKPYCNEIHAQAQLWLKRDPKASYDAWKKCLPIRGIDGNGKAPSKSELRHLYLTEKYVWRWKQFLSRRGKRTSPLDLKLGHNNWLRQVLFTPATQAARQAACTIVEALATIPSRKQQVLDLLTSYLDELSIAGECAAEYLALYQKLITSAHWKVYLAARGVLPYVGNLITKEIARLLALEEATLSTDLQQGYALKSLTGLLSSFVEVESIKRHFKSRLVGTVLNGYLCLRKLVVQRTKLIDETQDMLLEMLEDMTTGTESETKAFMAVCIETAKRYNLDDYRTPVFIFERLCSIIYPEENEVTEFFVTLEKDPQQEDFLQGRMPGNPYSSNEPGIGPLMRDIKNKICQDCDLVALLEDDSGMELLVNNKIISLDLPVAEVYKKVWCTTNEGEPMRIVYRMRGLLGDATEEFIESLDSTTDEEEDEEEVYKMAGVMAQCGGLECMLNRLAGIRDFKQGRHLLTVLLKLFSYCVKVKVNRQQLVKLEMNTLNVMLGTLNLALVAEQESKDSGGAAVAEQVLSIMEIILDESNAEPLSEDKGNLLLTGDKDQLVMLLDQINSTFVRSNPSVLQGLLRIIPYLSFGEVEKMQILVERFKPYCNFDKYDEDHSGDDKVFLDCFCKIAAGIKNNSNGHQLKDLILQKGITQNALDYMKKHIPSAKNLDADIWKKFLSRPALPFILRLLRGLAIQHPGTQVLIGTDSIPNLHKLEQVSSDEGIGTLAENLLEALREHPDVNKKIDAARRETRAEKKRMAMAMRQKALGTLGMTTNEKGQVVTKTALLKQMEELIEEPGLTCCICREGYKFQPTKVLGIYTFTKRVALEEMENKPRKQQGYSTVSHFNIVHYDCHLAAVRLARGREEWESAALQNANTKCNGLLPVWGPHVPESAFATCLARHNTYLQECTGQREPTYQLNIHDIKLLFLRFAMEQSFSADTGGGGRESNIHLIPYIIHTVLYVLNTTRATSREEKNLQGFLEQPKEKWVESAFEVDGPYYFTVLALHILPPEQWRATRVEILRRLLVTSQARAVAPGGATRLTDKAVKDYSAYRSSLLFWALVDLIYNMFKKVPTSNTEGGWSCSLAEYIRHNDMPIYEAADKALKTFQEEFMPVETFSEFLDVAGLLSEITDPESFLKDLLNSVP

SEQ ID NO: 189 - protein, 3874 aa, Homo sapiens
  MOD_RES (195)..(195): Any amino acid
  MOD_RES (606)..(606): Any amino acid
MGRVLEIKGLGDVALTVGLEAGGCGTHGTPKPQVTWRKGPSSEPLHGQPGVAVLEEGSLFLASVSPADSGDYECQATNEVGSTSRRAKLVVYVPPSIREDGRKANVSGMAGQSLTLECDANGFPVPEIVWLKDAQLVGVPLGWAGYGWDLGWGQVGGHRLLDEGQSLHFPRIQPGRSGRRGAQAGGSAQTKAPWXAGLAGFEQFPTPHAFSPPAPPSVLGAGAAQEVLGLAGADVELQCWTSGVPTPQVEWTKDRQPVLPGGPHLQVQEDGQVLRITGSHVGDEGRYQCVAFSPAGQQARDFQLRVHAPPTIWGSNETGEVAVMEDHLVQLLCEARGVPTPNITWFKDGALLPTSTKVVYTRGGRQLQLGRAQSSDAGVYTCKASNAVGAAEKATRLDVYVPPTIEGAGGRPYVVKAVAGRPVALECVARGHPSPTLSWHHEGLPVAESNESRLETDGSVLRLESPGEASSGLYSCVASSPAGEAVLQYSVEVQVPPQLLVAEGLGQVTTIVGQPLELPCQASGSPVPTIQWLQNGRPAEELAGVQVASQGTTLHIDHVELDHSGLFACQATNEAGTAGAEVEVSVHGEWAPGVLEVPIGQYHWGXEHHSSFPAACDPPVHRGWGAHPKPPLVEGWCSPGSLWGEPTGIPVAYSLPPPLQIEKVDLRDEGIYTCAATNLAGESKREVALKVLVPPNIEPGPVNKAVLENASVTLECLASGVPPPDVSWFKGHQPVSSWMGVTVSVDGRVLRIEQAQLSDAGSYRCVASNVAGSTELRYGLRVNVPPRITLPPSLPGPVLVNTPVRLTCNATGAPSPTLMWLKDGNPVSPAGTPGLQVFPGGRVLTLASARASDSGRYSCVAVSAVGEDRQDVVLQVHMPPSILGEELNVSVVANESVALECQSHAMPPPVLSWWKDGRPLEPRPGVHLSADKALLQVDRADVWDAGHYTCEALNQAGRSEKHYNLNVWVAPVFPLRESHTLTVREGHPTSLSCECRGVPFPKISWRKDGQPLPGEGAGLQHVSAVGRLLYLGQAQLAQEGTYTCECSNVVGNSSQDLQLEVHVPPQIAGPREPPTQVSVVQDGVATLECNATGKPPPTVTWERDGQPVGAELGLQLQNQGQSLHVERAQAAHTGRYSCVAENLAGRAERKFELSVLVPPELIGDLDPLTNITAALHSPLTLLCEAMGIPPPAIRWFRGEEPVSPGEDTYLLAGGWMLKMTQTQEQDSGLYSCLASNEAGEARRNFSVEVLVPPSIENEDLEEVIKVLDGQTAHLMCNVTGHPQPKLTWFKDGRPLARGDAHHISPDGVLLQVLQANLSSAGHYSCIAANAVGEKTKHFQLSVLLAPTILGGAEDSADEEVTVTVNNPISLICEALAFPSPNITWMKDGAPFEASRNIQLLPGTHGLQILNAQKEDAGQYTCVVTNELGEAVKNYHVEVLIPPSISKDDPLGEVGVKEVKTKVNSTLTLECESWAVPPPTIRWYKDGQPVTPSSRLQVLGEGRLLQIQPTQVSDSGRYLCVATNVAGEDDQDFNVLIQVPPMFQKVGDFSAAFEILSREEEARGGVTEYREIVENNPAYLYCDTNAIPPPDLTWYREDQPLSAGDEVSVLQGGRVLQIPLVRAENAGRYSCKASNEVGEDWLHYELLVLTPPVILGDTEELVEEVTVNASSTVSLQCPALGNPVPTISWLQNGLPFSPSPRLQVLEDGQVLQVSTAEVADAASYMCVAENQAGSAEKLFTLRVQVPPRIAGLDLEQVTAILNSSVSLPCDVHAHPNPEVTWYKDSQALSLGEEVFLLPGTHTLQLGRARLSDSGMYTCEALNAAGRDQKLVQLSVLVPPAFRQAPRGPQDAVLVRVGDKAVLSCETDALPEPTVTWYKDGQPLVLAQRTQALRGGQRLEIQEAQVSDKGLYSCKVSNVAGEAVRTFTLTVQVPPTFENPKTETVSQVAGSPLVLTCDVSGVPAPTVTWLKDRMPVESSAVHGVVSRGGRLQLSRLQPAQAGTYTCVAENTQAEARKDFVVAVLVAPRIRSSGVAREHHVLEGQEVRLDCEADGQPPPDVAWLKDGSPLGQDMGPHLRFYLDGGSLVLKGLRASDAGAYTCVAHNPAGEDARLHTVNVLVPPTIKQGADGSGTLVSRPGELVTMVCPVRGSPPIHVSWLKDGLPLPLSQRTLLHGSGHTLRISKVQLADAGIFTCVAASPAGVADRNFTLQVQVPPVLEPVEFQNDVVVVRGSLVELPCEARGVPLPLVSWMKDGEPLLSQSLEQGPSLQLEAVGAGDSGTYSCVAVSEAGEARRHFQLTVMEPPHIEDSGQPTELSLTPGAPMELLCDAQGTPQPNITWHKDGQALTRLENNSRATRVLRVRDAGLYTCLAESPAGAIEKSFRVRVQAPPNIVGPRGPRFVVGLAPGQLVLECSVEAEPAPKITWHRDGIVLQEDAHTQFPERGRFLQLQALSTADSGDYSCTARNAAGSTSVAFRVEIHTVPTIRSGPPAVNVSVNQTALLPCQADGVPAPLVSWRKDRVPLDPRSPRFEILPEGSLRIQPVLAQDAGHYLCLASNSAGSDRQGRDLRVLEPPAIAPSPSNLTLTAHTPALLPCEASGSPKPLVVWWKDGQKLDFRLQQGAYRLLPSNALLLTAPGPQDSAQFECVVSNEVGEAHRLYQVTVHVPPTIADDQTDFTVTMMAPVVLTCHSTGIPAPTVSWSKAGAQLGARGSGYRVSPSGALEIGQALPIHAGRYTCSARNSAGVAHKHVFLTVQASPVVKPLPSVVRAVAEEEVLLPCEASGIPRPTITWQKEGLNVATGVSTQVLPGGQLRIAHASPEDAGNYLCIAKNSAGSAMGKTRLVVQVPPVIENGLPDLSTTEGSHAFLPCKARGSPEPNITWDKDGQPVSGAEGKFTIQPSGELLVKNLEGQDAGTYTCTAENAVGRARRRVHLTILVLPVFTTLPGDRSLRLGDRLWLRCAARGSPTPRIGWTVNDRPVTEGVSEQDGGSTLQRAAVSREDSGTYVCWAENRVGRTQAVSFVHVKEAPVLQGEAFSYLVEPVGGSIQLDCVVRGDPVPDIHWIKDGLPLRGSHLRHQLQNGSLTIHRTERDDAGRYQCLAENEMGVAKKVVILVLQSAPVFQVEPQDMTVRSGDDVALRCQATGEPTPTIEWLQAGQPLRASRRLRTLPDGSLWLENVETGDAGTYDCVAHNLLGSATARAFLVVRGEPQGSWGSMTGVINGRKFGVATLNTSVMQEAHSGVSSIHSSIRHVPANVGPLMRVLVVTIAPIYWALARESGEALNGHSLTGGRFRQESHVEFATGELLTMTQVARGLDPDGLLLLDVVVNGVVPESLADADLQVQDFEEHYVQTGPGQLFVGSTQRFFQGGLPSFLRCNHSIQYNAARGPQPQLVQHLRASAISSAFDPEAEALRFQLATALQAEENEVGCPEGFELDSQGAFCVDRDECSGGPSPCSHACLNAPGRFSCTCPTGFALAWDDRNCRDVDECAWDAHLCREGQRCVNLLGSYRCLPDCGPGFRVADGAGCEDVDECLEGLDDCHYNQLCENTPGGHRCSCPRGYRMQGPSLPCLDVNECLQLPKACAYQCHNLQGSYRCLCPPGQTLLRDGKACTSLERNGQNVTTVSHRGPLLPWLRPWASIPGTSYHAWVSLRPGPMALSSVGRAWCPPGFIRQNGVCTDLDECRVRNLCQHACRNTEGSYQCLCPAGYRLLPSGKNCQDINECEEESIECGPGQMCFNTRGSYQCVDTPCPATYRQGPSPGTCFRRCSQDCGTGGPSTLQYRLLPLPLGVRAHHDVARLTAFSEVGVPANRTELSMLEPDPRSPFALRPLRAGLGAVYTRRALTRAGLYRLTVRAAAPRHQSVFVLLIAVSPYPY

SEQ ID NO: 190 - protein, 2725 aa, Homo sapiens
MMNNSGYSDAGLGLGDETDEMPSTEKDLAEDAPWKKIQQNTFTRWCNEHLKCVGKRLTDLQRDLSDGLRLIALLEVLSQKRMYRKFHPRPNFRQMKLENVSVALEFLEREHIKLVSIDSKAIVDGNLKLILGLIWTLILHYSISMPMWEDEDDEDARKQTPKQRLLGWIQNKVPQLPITNFNRDWQDGKALGALVDNCAPGLCPDWEAWDPNQPVENAREAMQQADDWLGVPQVIAPEEIVDPNVDEHSVMTYLSQFPKAKLKPGAPVRSKQLNPKKAIAYGPGIEPQGNTVLQPAHFTVQTVDAGVGEVLVYIEDPEGHTEEAKVVPNNDKDRTYAVSYVPKVAGLHKVTVLFAGQNIERSPFEVNVGMALGDANKVSARGPGLEPVGNVANKPTYFDIYTAGAGTGDVAVVIVDPQGRRDTVEVALEDKGDSTFRCTYRPAMEGPHTVHVAFAGAPITRSPFPVHVSEACNPNACRASGRGLQPKGVRVKEVADFKVFTKGAGSGELKVTVKGPKGTEEPVKVREAGDGVFECEYYPVVPGKYVVTITWGGYAIPRSPFEVQVSPEAGVQKVRAWGPGLETGQVGKSADFVVEAIGTEVGTLGFSIEGPSQAKIECDDKGDGSCDVRYWPTEPGEYAVHVICDDEDIRDSPFIAHILPAPPDCFPDKVKAFGPGLEPTGCIVDKPAEFTIDARAAGKGDLKLYAQDADGCPIDIKVIPNGDGTFRCSYVPTKPIKHTIIISWGGVNVPKSPFRVNVGEGSHPERVKVYGPGVEKTGLKANEPTYFTVDCSEAGQGDVSIGIKCAPGVVGPAEADIDFDIIKNDNDTFTVKYTPPGAGRYTIMVLFANQEIPASPFHIKVDPSHDASKVKAEGPGLNRTGVEVGKPTHFTVLTKGAGKAKLDVQFAGTAKGEVVRDFEIIDNHDYSYTVKYTAVQQGNMAVTVTYGGDPVPKSPFVVNVAPPLDLSKIKVQGLNSKVAVGQEQAFSVNTRGAGGQGQLDVRMTSPSRRPIPCKLEPGGGAEAQAVRYMPPEEGPYKVDITYDGHPVPGSPFAVEGVLPPDPSKVCAYGPGLKGGLVGTPAPFSIDTKGAGTGGLGLTVEGPCEAKIECQDNGDGSCAVSYLPTEPGEYTINILFAEAHIPGSPFKATIRPVFDPSKVRASGPGLERGKVGEAATFTVDCSEAGEAELTIEILSDAGVKAEVLIHNNADGTYHITYSPAFPGTYTITIKYGGHPVPKFPTRVHVQPAVDTSGVKVSGPGVEPHGVLREVTTEFTVDARSLTATGGNHVTARVLNPSGAKTDTYVTDNGDGTYRVQYTAYEEGVHLVEVLYDEVAVPKSPFRVGVTEGCDPTRVRAFGPGLEGGLVNKANRFTVETRGAGTGGLGLAIEGPSEAKMSCKDNKDGSCTVEYIPFTPGDYDVNITFGGRPIPGSPFRVPVKDVVDPGKVKCSGPGLGAGVRARVPQTFTVDCSQAGRAPLQVAVLGPTGVAEPVEVRDNGDGTHTVHYTPATDGPYTVAVKYADQEVPRSPFKIKVLPAHDASKVRASGPGLNASGIPASLPVEFTIDARDAGEGLLTVQILDPEGKPKKANIRDNGDGTYTVSYLPDMSGRYTITIKYGGDEIPYSPFRIHALPTGDASKCLVTVSIGGHGLGACLGPRIQIGQETVITVDAKAAGEGKVTCTVSTPDGAELDVDVVENHDGTFDIYYTAPEPGKYVITIRFGGEHIPNSPFHVLACDPLPHEEEPSEVPQLRQPYAPPRPGARPTHWATEEPVVPVEPMESMLRPFNLVIPFAVQKGELTGEVRMPSGKTARPNITDNKDGTITVRYAPTEKGLHQMGIKYDGNHIPGSPLQFYVDAINSRHVSAYGPGLSHGMVNKPATFTIVTKDAGEGGLSLAVEGPSKAEITCKDNKDGTCTVSYLPTAPGDYSIIVRFDDKHIPGSPFTAKITGDDSMRTSQLNVGTSTDVSLKITESDLSQLTASIRAPSGNEEPCLLKRLPNRHIGISFTPKEVGEHVVSVRKSGKHVTNSPFKILVGPSEIGDASKVRVWGKGLSEGHTFQVAEFIVDTRNAGYGGLGLSIEGPSKVDINCEDMEDGTCKVTYCPTEPGTYIINIKFADKHVPGSPFTVKVTGEGRMKESITRRRQAPSIATIGSTCDLNLKIPGNWFQMVSAQERLTRTFTRSSHTYTRTERTEISKTRGGETKREVRVEESTQVGGDPFPAVFGDFLGRERLGSFGSITRQQEGEASSQDMTAQVTSPSGKVEAAEIVEGEDSAYSVRFVPQEMGPHTVAVKYRGQHVPGSPFQFTVGPLGEGGAHKVRAGGTGLERGVAGVPAEFSIWTREAGAGGLSIAVEGPSKAEIAFEDRKDGSCGVSYVVQEPGDYEVSIKFNDEHIPDSPFVVPVASLSDDARRLTVTSLQETGLKVNQPASFAVQLNGARGVIDARVHTPSGAVEECYVSELDSDKHTIRFIPHENGVHSIDVKFNGAHIPGSPFKIRVGEQSQAGDPGLVSAYGPGLEGGTTGVSSEFIVNTLNAGSGALSVTIDGPSKVQLDCRECPEGHVVTYTPMAPGNYLIAIKYGGPQHIVGSPFKAKVTGPRLSGGHSLHETSTVLVETVTKSSSSRGSSYSSIPKFSSDASKVVTRGPGLSQAFVGQKNSFTVDCSKAGTNMMMVGVHGPKTPCEEVYVKHMGNRVYNVTYTVKEKGDYILIVKWGDESVPGSPFKVKVP

SEQ ID NO: 191 - protein, 2818 aa, Homo sapiens
MAAHRPVEWVQAVVSRFDEQLPIKTGQQNTHTKVSTEHNKECLINISKYKFSLVISGLTTILKNVNNMRIFGEAAEKNLYLSQLIILDTLEKCLAGQPKDTMRLDETMLVKQLLPEICHFLHTCREGNQHAAELRNSASGVLFSLSCNNFNAVFSRISTRLQELTVCSEDNVDVHDIELLQYINVDCAKLKRLLKETAFKFKALKKVAQLAVINSLEKAFWNWVENYPDEFTKLYQIPQTDMAECAEKLFDLVDGFAESTKRKAAVWPLQIILLILCPEIIQDISKDVVDENNMNKKLFLDSLRKALAGHGGSRQLTESAAIACVKLCKASTYINWEDNSVIFLLVQSMVVDLKNLLFNPSKPFSRGSQPADVDLMIDCLVSCFRISPHNNQHFKICLAQNSPSTFHYVLVNSLHRIITNSALDWWPKIDAVYCHSVELRNMFGETLHKAVQGCGAHPAIRMAPSLTFKEKVTSLKFKEKPTDLETRSYKYLLLSMVKLIHADPKLLLCNPRKQGPETQGSTAELITGLVQLVPQSHMPEIAQEAMEALLVLHQLDSIDLWNPDAPVETFWEISSQMLFYICKKLTSHQMLSSTEILKWLREILICRNKFLLKNKQADRSSCHFLLFYGVGCDIPSSGNTSQMSMDHEELLRTPGASLRKGKGNSSMDSAAGCSGTPPICRQAQTKLEVALYMFLWNPDTEAVLVAMSCFRHLCEEADIRCGVDEVSVHNLLPNYNTFMEFASVSNMMSTGRAALQKRVMALLRRIEHPTAGNTEAWEDTHAKWEQATKLILNYPKAKMEDGQAAESLHKTIVKRRMSHVSGGGSIDLSDTDSLQEWINMTGFLCALGGVCLQQRSNSGLATYSPPMGPVSERKGSMISVMSSEGNADTPVSKFMDRLLSLMVCNHEKVGLQIRTNVKDLVGLELSPALYPMLFNKLKNTISKFFDSQGQVLLTDTNTQFVEQTIAIMKNLLDNHTEGSSEHLGQASIETMMLNLVRYVRVLGNMVHAIQIKTKLCQLVEVMMARRDDLSFCQEMKFRNKMVEYLTDWVMGTSNQAADDDVKCLTRDLDQASMEAVVSLLAGLPLQPEEGDGVELMEAKSQLFLKYFTLFMNLLNDCSEVEDESAQTGGRKRGMSRRLASLRHCTVLAMSNLLNANVDSGLMHSIGLGYHKDLQTRATFMEVLTKILQQGTEFDTLAETVLADRFERLVELVTMMGDQGELPIAMALANVVPCSQWDELARVLVTLFDSRHLLYQLLWNMFSKEVELADSMQTLFRGNSLASKIMTFCFKVYGATYLQKLLDPLLRIVITSSDWQHVSFEVDPTRLEPSESLEENQRNLLQMTEKFFHAIISSSSEFPPQLRSVCHCLYQVVSQRFPQNSIGAVGSAMFLRFINPAIVSPYEAGILDKKPPPRIERGLKLMSKILQSIANHVLFTKEEHMRPFNDFVKSNFDAARRFFLDIASDCPTSDAVNHSLSFISDGNVLALHRLLWNNQEKIGQYLSSNRDHKAVGRRPFDKMATLLAYLGPPEHKPVADTHWSSLNLTSSKFEEFMTRHQVHEKEEFKALKTLSIFYQAGTSKAGNPIFYYVARRFKTGQINGDLLIYHVLLTLKPYYAKPYEIVVDLTHTGPSNRFKTDFLSKWFVVFPGFAYDNVSAVYIYNCNSWVREYTKYHERLLTGLKGSKRLVFIDCPGKLAEHIEHEQQKLPAATLALEEDLKVFHNALKLAHKDTKVSIKVGSTAVQVTSAERTKVLGQSVFLNDIYYASEIEEICLVDENQFTLTIANQGTPLTFMHQECEAIVQSIIHIRTRWELSQPDSIPQHTKIRPKDVPGTLLNIALLNLGSSDPSLRSAAYNLLCALTCTFNLKIEGQLLETSGLCIPANNTLFIVSISKTLAANEPHLTLEFLEECISGFSKSSIELKHLCLEYMTPWLSNLVRFCKHNDDAKRQRVTAILDKLITMTINEKQMYPSIQAKIWGSLGQITDLLDVVLDSFIKTSATGGLGSIKAEVMADTAVALASGNVKLVSSKVIGRMCKIIDKTCLSPTPTLEQHLMWDDIAILARYMLMLSFNNSLDVAAHLPYLFHVVTFLVATGPLSLRASTHGLVINIIHSLCTCSQLHFSEETKQVLRLSLTEFSLPKFYLLFGISKVKSAAVIAFRSSYRDRSFSPGSYERETFALTSLETVTEALLEIMEACMRDIPTCKWLDQWTELAQRFAFQYNPSLQPRALVVFGCISKRVSHGQIKQIIRILSKALESCLKGPDTYNSQVLIEATVIALTKLQPLLNKDSPLHKALFWVAVAVLQLDEVNLYSAGTALLEQNLHTLDSLRIFNDKSPEEVFMAIRNPLEWHCKQMDHFVGLNFNSNFNFALVGHLLKGYRHPSPAIVARTVRILHTLLTLVNKHRNCDKFEVNTQSVAYLAALLTVSEEVRSRCSLKHRKSLLLTDISMENVPMDTYPIHHGDPSYRTLKETQPWSSPKGSEGYLAATYPTVGQTSPRARKSMSLDMGQPSQANTKKLLGTRKSFDHLISDTKAPKRQEMESGITTPPKMRRVAETDYEMETQRISSSQQHPHLRKVSVSESNVLLDEEVLTDPKIQALLLTVLATLVKYTTDEFDQRILYEYLAEASVVFPKVFPVVHNLLDSKINTLLSLCQDPNLLNPIHGIVQSVVYHEESPPQYQTSYLQSFGFNGLWRFAGPFSKQTQIPDYAELIVKFLDALIDTYLPGIDEETSEESLLTPTSPYPPALQSQLSITANLNLSNSMTSLATSQHSPGIDKENVELSPTTGHCNSGRTRHGSASQVQKQRSAGSFKRNSIKKIV

SEQ ID NO: 192 - protein, 2298 aa, Homo sapiens
MDPEEQELLNDYRYRSYSSVIEKALRNFESSSEWADLISSLGKLNKALQSNLRYSLLPRRLLISKRLAQCLHPALPSGVHLKALETYEIIFKIVGTKWLAKDLFLYSCGLFPLLAHAAVSVRPVLLTLYEKYFLPLQKLLLPSLQAFIVGLLPGLEEGSEISDRTDALLLRLSLVVGKEVFYTALWGSVLASPSIRLPASVFVVGHINRDAPGREQKYMLGTNHQLTVKSLRASLLDSNVLVQRNNLEIVLFFFPFYTCLDSNERAIPLLRSDIVRILSAATQTLLRRDMSLNRRLYAWLLGSDIKGNTVVPESEISNSYEDQSSYFFEKYSKDLLVEGLAEILHQKFIDADVEERHHAYLKPFRVLISLLDKPEIGPQVVGNLFLEVIRAFYSYCRDALGSDLKLSYTQSGNSLISAIKENRNASEIVKTVNLLITSLSTDFLWDYMTRCFEECFRPVKQRYSVRNSVSPPPTVSELCALLVFLLDVIPLELYSEVQTQYLPQVLGCLVQPLAEDMEALSLPELTHALKTCFKVLSKVQMPPSYLDTESTSGTSSPVKGENGKIILETKAVIPGDEDASFPPLKSEDSGIGLSASSPELSEHLRVPRVSLERDDVWKKGGSMQRTFLCIQELIANFASKNIFGVQLTASGEESKSEEPAGKRDRDGTQSLAANDSSRKNSWEPKPITVPQFKQMLSDLFTARGSPFKTKSSESPSSSPSSPARKNGGEWDVEKVVIDLGGSREERREAFAAACHLLLDCATFPVYLSEEETEQLCATLFQLPGAGDSSFPSWLKSLMTICCCVTDCYLQNVAISTLLEVINHSQSLALVIEDKMKRYKSSGHNPFFGKLQMVTVPPIAPGILKVIAEKTDFYQRVARVLWNQLNKETREHHVTCVELFYRLHCLAPTANICEDIICHALLDPDKGTRLEALFRFSVIWHLTREIQGSRVTSHNRSFDRSLFVVLDSLACTDGAIGAAAQGWLVRALSLGDVARILEPVLLLLLQPKTQRTSIHCLKQENSADDLHRWFNRKKTSFREACAVPEPQESGSEEHLPLSQFTTVDREAIWAEVEKEPEKYPLRGELSEEELPYYVELPDRTAHGAPDSSEHTESADTSSCHTDSENTSSFSSPSHDLQELSNEENCCAPIPMGGRAYPKRSALLAAFQSESFKAGAKLSLVRVDSDKTQASESFSSDEEADLELQALTTSRLLKQQRERQEAVEALFKHILLYLQPYDSRRVLYAFSVLEAVLKTNPKEFIEAVSRTSMDTSSTAHLNLISNLLARHQEALIGQSFYGKLQTQVPNVCPHSLLLELLTYLCLSFLRSYYPCYLKVSHRDILGNRDVQVKSVEVLIRIMMQLVSVAKSSEGKNVEFIHSLLQRCKVQEFVLLSLSASMYTSQKRYGLATAHHGRALPEDSLFEESLINLGQDQIWSEHPLQIELLKLLQVLIVLEHHLGRAHEEAENQPDLSREWQRALNFQQAISALQYVQPHPLTSQGLLVSAVVRGLQPAYGYGMHPAWVSLVTHSLPYFGKSLGWTVTPFVVQICKNLDDLVKQYESESVKLSVSTTSKRENISPDYPLTLLEGLTTISHFCLLEQANQNKKTMAAGDPANLRNARNAILEELPRTVNTMALLWNVLRKEETQKRPVDLLGATKGSSSVYFKTTKTIRQKILDFLNPLTAHLGVQLTAAVAAVWSRKKAQRHSKMKIIPTASASQLTLVDLVCALSTLQTDTLLHLVKEVVKRPPQVKGGDEKSPLVDIPVLQFCYAFLQRLPVPALQENFSSLLGVLKESVQLNLAPPGYFLLLSMLNDFVTRTPNLENKKDQKDLQEITQKILEAVGNIAGSSLEQTSWLSRNLEVKAQPQASLEESDAEEDLYDAAAASAMVSSSAPSVYSVQALSLLAEVLASLLDMVYRSDEKEKAVPLISRLLYYVFPYLRNHSAYNAPSFRAGAQLLSSLSGYAYTKRAWRKEVLELFLDPAFFQMDTSCVHWKSIIDHLLTHEKTMFKDLMNMQSSSLKLFSSFEQKAMLLKRQAFAVFSGELDQYHLYLPLIQERLTDNLRVGQTSIVAAQMFLFFRVLLLRISPQHLTSLWPIMVSELIQTFTQLEEDLKDEDESLRSTNKVNRTKVSVPDANGPSVGEIPQSELILYLSACKFLDTALSFPPDKMPLFQIYRWAFIPEVDTEGPAFLSDVEENHQECKPHTVRILELLKLKFGEISSSDEITMKSEFPLLRQHSVSSIRQLMPFFMTLNGAFKTQRQLPADSPGTPFLDFPVTDSPRILKQLEECIEYDFLEHPEC

SEQ ID NO: 193 - protein, 2157 aa, Homo sapiens
MSDRSGPTAKGKDGKKYSSLNLFDTYKGKSLEIQKPAVAPRHGLQSLGKVAIARRMPPPANLPSLKAENKGNDPNVSLVPKDGTGWASKQEQSDPKSSDASTAQPPESQPLPASQTPASNQPKRPPAAPENTPLVPSGVKSWAQASVTHGAHGDGGRASSLLSRFSREEFPTLQAAGDQDKAAKERESAEQSSGPGPSLRPQNSTTWRDGGGRGPDELEGPDSKLHHGHDPRGGLQPSGPPQFPPYRGMMPPFMYPPYLPFPPPYGPQGPYRYPTPDGPSRFPRVAGPRGSGPPMRLVEPVGRPSILKEDNLKEFDQLDQENDDGWAGAHEEVDYTEKLKFSDEEDGRDSDEEGAEGHRDSQSASGEERPPEADGKKGNSPNSEPPTPKTAWAETSRPPETEPGPPAPKPPLPPPHRGPAGNWGPPGDYPDRGGPPCKPPAPEDEDEAWRQRRKQSSSEISLAVERARRRREEEERRMQEERRAACAEKLKRLDEKFGAPDKRLKAEPAAPPAAPSTPAPPPAVPKELPAPPAPPPASAPTPETEPEEPAQAPPAQSTPTPGVAAAPTLVSGGGSTSSTSSGSFEASPVEPQLPSKEGPEPPEEVPPPTTPPVPKVEPKGDGIGPTRQPPSQGLGYPKYQKSLPPRFQRQQQEQLLKQQQQHQWQQHQQGSAPPTPVPPSPPQPVTLGAVPAPQAPPPPPKALYPGALGRPPPMPPMNFDPRWMMIPPYVDPRLLQGRPPLDFYPPGVHPSGLVPRERSDSGGSSSEPFDRHAPAMLRERGTPPVDPKLAWVGDVFTATPAEPRPLTSPLRQAADEDDKGMRSETPPVPPPPPYLASYPGFPENGAPGPPISRFPLEEPGPRPLPWPPGSDEVAKIQTPPPKKEPPKEETAQLTGPEAGRKPARGVGSGGQGPPPPRRESRTETRWGPRPGSSRRGIPPEEPGAPPRRAGPIKKPPPPTKVEELPPKPLEQGDETPKPPKPDPLKITKGKLGGPKETPPNGNLSPAPRLRRDYSYERVGPTSCRGRGRGEYFARGRGFRGTYGGRGRGARSREFRSYREFRGDDGRGGGTGGPNHPPAPRGRTASETRSEGSEYEEIPKRRRQRGSETGSETHESDLAPSDKEAPTPKEGTLTQVPLAPPPPGAPPSPAPARFTARGGRVFTPRGVPSRRGRGGGRPPPQVCPGWSPPAKSLAPKKPPTGPLPPSKEPLKEKLIPGPLSPVARGGSNGGSNVGMEDGERPRRRRHGRAQQQDKPPRFRRLKQERENAARGSEGKPSLTLPASAPGPEEALTTVTVAPAPRRAAAKSPDLSNQNSDQANEEWETASESSDFTSERRGDKEAPPPVLLTPKAVGTPGGGGGGAVPGISAMSRGDLSQRAKDLSKRSFSSQRPGMERQNRRPGPGGKAGSSGSSSGGGGGGPGGRTGPGRGDKRSWPSPKNRSRPPEERPPGLPLPPPPPSSSAVFRLDQVIHSNPAGIQQALAQLSSRQGSVTAPGGHPRHKPGLPQAPQGPSPRPPTRYEPQRVNSGLSSDPHFEEPGPMVRGVGGTPRDSAGVSPFPPKRRERPPRKPELLQEESLPPPHSSGFLGSKPEGPGPQAESRDTGTEALTPHIWNRLHTATSRKSYRPSSMEPWMEPLSPFEDVAGTEMSQSDSGVDLSGDSQVSSGPCSQRSSPDGGLKGAAEGPPKRPGGSSPLNAVPCEGPPGSEPPRRPPPAPHDGDRKELPREQPLPPGPIGTERSQRTDRGTEPGPIRPSHRPGPPVQFGTSDKDSDLRLVVGDSLKAEKELTASVTEAIPVSRDWELLPSAAASAEPQSKNLDSGHCVPEPSSSGQRLYPEVFYGSAGPSSSQISGGAMDSQLHPNSGGFRPGTPSLHPYRSQPLYLPPGPAPPSALLSGLALKGQFLDFSTMQATELGKLPAGGVLYPPPSFLYSPAFCPSPLPDTSLLQVRQDLPSPSDFYSTPLQPGGQSGFLPSGAPAQQMLLPMVDSQLPVVNFGSLPPAPPPAPPPLSLLPVGPALQPPSLAVRPPPAPATRVLPSPARPFPASLGRAELHPVELKPFQDYQKLSSNLGGPGSSRTPPTGRSFSGLNSRLKATPSTYSGVFRTQRVDLYQQASPPDALRWIPKPWERTGPPPREGPSRRAEEPGSRGDKEPGLPPPR

SEQ ID NO: 194 - protein, 3997 aa, Homo sapiens
MLESYVTPILMSYVNRYIKNLKPSDLQLSLWGGDVVLSKLELKLDVLEQELKLPFTFLSGHIHELRIHVPWTKLGSEPVVITINTMECILKLKDGIQDDHESCGSNSTNRSTAESTKSSIKPRRMQQAAPTDPDLPPGYVQSLIRRVVNNVNIVINNLILKYVEDDIVLSVNITSAECYTVGELWDRAFMDISATDLVLRKVINFSDCTVCLDKRNASGKIEFYQDPLLYKCSFRTRLHFTYENLNSKMPSVIKIHTLVESLKLSITDQQLPMFIRIMQLGIALYYGEIGNFKEGEIEDLTCHNKDMLGNITGSEDETRIDMQYPAQHKGQELYSQQDEEQPQGWVSWAWSFVPAIVSYDDGEEDFVGNDPASTMHQQKAQTLKDPIVSIGFYCTKATVTFKLTEMQVESSYYSPQKVKSKEVLCWEQEGTTVEALMMGEPFFDCQIGFVGCRAMCLKGIMGVKDFEENMNRSETEACFFICGDNLSTKGFTYLTNSLFDYRSPENNGTRAEFILDSTHHKETYTEIAGMQRFGAFYMDYLYTMENTSGKGSTNQQDFSSGKSEDLGTVQEKSTKSLVIGPLDFRLDSSAVHRILKMIVCALEHEYEPYSRLKSDIKDENETILNPEEVALLEEYIPTRHTSVTLLKCTCTISMAEFNLLDHLLPVIMGEKNSSNFMNTTNFQSLRPLPSIRILVDKINLEHSVPMYAEQLVHVVSSLTQPSDNLLHYCYVHCYLKIFGFQAGLTSLDCSGSYCLPVPVIPSFSTALYGKLLKLPTCWTKRSQIAITEGIFELPNLTIQATRAQTLLLQAIYQSWSHLGNVSSSAVIEALINEIFLSIGVKSKNPLPTLEGSIQNVELKYCSTSLVKCASGTMGSIKICAKAPVDSGKEKLIPLLQGPSDTKDLHSTKWLNESRKPESLLAPDLMAFTIQVPQYIDYCHNSGAVLLCSIQGLAVNIDPILYTWLIYQPQKRTSRHMQQQPVVAVPLVMPVCRRKEDEVSIGSAPLAKQQSYQASEYASSPVKTKTVTESRPLSVPVKAMLNISESCRSPEERMKEFIGIVWNAVKHLTLQLEVQSCCVFIPNDSLPSPSTIVSGDIPGTVRSWYHGQTSMPGTLVLCLPQIKIISAGHKYMEPLQEIPFVIPRPILEEGDAFPWTISLHNFSIYTLLGKQVTLCLVEPMGCTSTLAVTSQKLLATGPDTRHSFVVCLHVDLESLEIKCSNPQVQLFYELTDIMNKVWNKIQKRGNLNLSPTSPETMAGPVPTSPVRSSIGTAPPDTSTCSPSADIGTTTEGDSIQAGEESPFSDSVTLEQTTSNIGGTSGRVSLWMQWVLPKITIKLFAPDPENKGTEVCMVSELEDLSASIDVQDVYTKVKCKIESFNIDHYRSRPGEGWQSGHFEGVFLQCKEKSVTTTKLLDGTHQQHGFLSLTYTKAVTKNVRHKLTSRNERRSFHKLSEGLMDGSPHFLHEILLSAQAFDIVLYFPLLNAIASIFQAKLPKTQKEKRKSPGQPMRTHTLTSRNLPLIYVNTSVIRIFIPKTEEMQPTVEANQAAKEDTVVLKIGSVAMAPQADNPLGRSVLRKDIYQRALNLGILRDPGSEIEDRQYQIDLQSINIGTAQWHQLKPEKESVSGGVVTETERNSQNPALEWNMASSIRRHQERRAILTPVLTDFSVRITGAPAVIFTKVVSPENLHTEEILVCGHSLEVNITTNLDFFLSVAQVQLLHQLIVANMTGLEPSNKAAEISKQEQKKVDIFDGGMAETSSRYSGAQDSGIGSDSVKIRIVQIEQHSGASQHRIARPSRQSSIVKNLNFIPFDIFITASRISLMTYSCMALSKSKSQEQKNNEKTDKSSLNLPEVDSDVAKPNQACISTVTAEDLLRSSISFPSGKKIGVLSLESLHASTRSSARQALGITIVRQPGRRGTGDLQLEPFLYFIVSQPSLLLSCHHRKQRVEVSIFDAVLKGVASDYKCIDPGKTLPEALDYCTVWLQTVPGEIDSKSGIPPSFITLQIKDFLNGPADVNLDISKPLKANLSFTKLDQINLFLKKIKNAHSLAHSEETSAMSNTMVNKDDLPVSKYYRGKLSKPKIHGDGVQKISAQENMWRAVSCFQKISVQTTQIVISMETVPHTSKPCLLASLSNLNGSLSVKATQKVPGIILGSSFLLSINDFLLKTSLKERSRILIGPCCATANLEAKWCKHSGNPGPEQSIPKISIDLRGGLLQVFWGQEHLNCLVLLHELLNGYLNEEGNFEVQVSEPVPQMSSPVEKNQTFKSEQSSDDLRTGLFQYVQDAESLKLPGVYEVLFYNETEDCPGMMLWRYPEPRVLTLVRITPVPFNTTEDPDISTADLGDVLQVPCSLEYWDELQKVFVAFREFNLSESKVCELQLPDINLVNDQKKLVSSDLWRIVLNSSQNGADDQSSASESGSQSTCDPLVTPTALAACTRVDSCFTPWFVPSLCVSFQFAHLEFHLCHHLDQLGTAAPQYLQPFVSDRNMPSELEYMIVSFREPHMYLRQWNNGSVCQEIQFLAQADCKLLECRNVTMQSVVKPFSIFGQMAVSSDVVEKLLDCTVIVDSVFVNLGQHVVHSLNTAIQAWQQNKCPEVEELVFSHFVICNDTQETLRFGQVDTDENILLASLHSHQYSWRSHKSPQLLHICIEGWGNWRWSEPFSVDHAGTFIRTIQYRGRTASLIIKVQQLNGVQKQIIICGRQIICSYLSQSIELKVVQHYIGQDGQAVVREHFDCLTAKQKLPSYILENNELTELCVKAKGDEDWSRDVCLESKAPEYSIVIQVPSSNSSIIYVWCTVLTLEPNSQVQQRMIVFSPLFIMRSHLPDPIIIHLEKRSLGLSETQIIPGKGQEKPLQNIEPDLVHHLTFQAREEYDPSDCAVPISTSLIKQIATKVHPGGTVNQILDEFYGPEKSLQPIWPYNKKDSDRNEQLSQWDSPMRVKLSIWKPYVRTLLIELLPWALLINESKWDLWLFEGEKIVLQVPAGKIIIPPNFQEAFQIGIYWANTNTVHKSVAIKLVHNLTSPKWKDGGNGEVVTLDEEAFVDTEIRLGAFPGHQKLCQFCISSMVQQGIQIIQIEDKTTIINNTPYQIFYKPQLSVCNPHSGKEYFRVPDSATFSICPGGEQPAMKSSSLPCWDLMPDISQSVLDASLLQKQIMLGFSPAPGADSSQCWSLPAIVRPEFPRQSVAVPLGNFRENGFCTRAIVLTYQEHLGVTYLTLSEDPSPRVIIHNRCPVKMLIKENIKDIPKFEVYCKKIPSECSIHHELYHQISSYPDCKTKDLLPSLLLRVEPLDEVTTEWSDAIDINSQGTQVVFLTGFGYVYVDVVHQCGTVFITVAPEGKAGPILTNTNRAPEKIVTFKMFITQLSLAVFDDLTHHKASAELLRLTLDNIFLCVAPGAGPLPGEEPVAALFELYCVEICCGDLQLDNQLYNKSNFHFAVLVCQGEKAEPIQCSKMQSLLISNKELEEYKEKCFIKLCITLNEGKSILCDINEFSFELKPARLYVEDTFVYYIKTLFDTYLPNSRLAGHSTHLSGGKQVLPMQVTQHARALVNPVKLRKLVIQPVNLLVSIHASLKLYIASDHTPLSFSVFERGPIFTTARQLVHALAMHYAAGALFRAGWVVGSLDILGSPASLVRSIGNGVADFFRLPYEGLTRGPGAFVSGVSRGTTSFVKHISKGTLTSITNLATSLARNMDRLSLDEEHYNRQEEWRRQLPESLGEGLRQGLSRLGISLLGAIAGIVDQPMQNFQKTSEAQASAGHKAKGVISGVGKGIMGVFTKPIGGAAELVSQTGYGILHGAGLSQLPKQRHQPSDLHADQAPNSHVKYVWKMLQSLGRPEVHMALDVVLVRGSGQEHEGCLLLTSEVLFVVSVSEDTQQQAFPVTEIDCAQDSKQNNLLTVQLKQPRVACDVEVDGVRERLSEQQYNRLVDYITKTSCHLAPSCSSMQIPCPVVAAEPPPSTVKTYHYLVDPHFAQVFLSKFTMVKNKALRKGFP

SEQ ID NO: 195 - protein, 2799 aa, Homo sapiens
MTSIHFVVHPLPGTEDQLNDRLREVSEKLNKYNLNSHPPLNVLEQATIKQCVVGPNHAAFLLEDGRVCRIGFSVQPDRLELGKPDNNDGSKLNSNSGAGRTSRPGRTSDSPWFLSGSETLGRLAGNTLGSRWSSGVGGSGGGSSGRSSAGARDSRRQTRVIRTGRDRGSGLLGSQPQPVIPASVIPEELISQAQVVLQGKSRSVIIRELQRTNLDVNLAVNNLLSRDDEDGDDGDDTASESYLPGEDLMSLLDADIHSAHPSVIIDADAMFSEDISYFGYPSFRRSSLSRLGSSRVLLLPLERDSELLRERESVLRLRERRWLDGASFDNERGSTSKEGEPNLDKKNTPVQSPVSLGEDLQWWPDKDGTKFICIGALYSELLAVSSKGELYQWKWSESEPYRNAQNPSLHHPRATFLGLTNEKIVLLSANSIRATVATENNKVATWVDETLSSVASKLEHTAQTYSELQGERIVSLHCCALYTCAQLENSLYWWGVVPFSQRKKMLEKARAKNKKPKSSAGISSMPNITVGTQVCLRNNPLYHAGAVAFSISAGIPKVGVLMESVWNMNDSCRFQLRSPESLKNMEKASKTTEAKPESKQEPVKTEMGPPPSPASTCSDASSIASSASMPYKRRRSTPAPKEEEKVNEEQWSLREVVFVEDVKNVPVGKVLKVDGAYVAVKFPGTSSNTNCQNSSGPDADPSSLLQDCRLLRIDELQVVKTGGTPKVPDCFQRTPKKLCIPEKTEILAVNVDSKGVHAVLKTGNWVRYCIFDLATGKAEQENNFPTSSIAFLGQNERNVAIFTAGQESPIILRDGNGTIYPMAKDCMGGIRDPDWLDLPPISSLGMGVHSLINLPANSTIKKKAAVIIMAVEKQTLMQHILRCDYEACRQYLMNLEQAVVLEQNLQMLQTFISHRCDGNRNILHACVSVCFPTSNKETKEEEEAERSERNTFAERLSAVEAIANAISVVSSNGPGNRAGSSSSRSLRLREMMRRSLRAAGLGRHEAGASSSDHQDPVSPPIAPPSWVPDPPAMDPDGDIDFILAPAVGSLTTAATGTGQGPSTSTIPGPSTEPSVVESKDRKANAHFILKLLCDSVVLQPYLRELLSAKDARGMTPFMSAVSGRAYPAAITILETAQKIAKAEISSSEKEEDVFMGMVCPSGTNPDDSPLYVLCCNDTCSFTWTGAEHINQDIFECRTCGLLESLCCCTECARVCHKGHDCKLKRTSPTAYCDCWEKCKCKTLIAGQKSARLDLLYRLLTATNLVTLPNSRGEHLLLFLVQTVARQTVEHCQYRPPRIREDRNRKTASPEDSDMPDHDLEPPRFAQLALERVLQDWNALKSMIMFGSQENKDPLSASSRIGHLLPEEQVYLNQQSGTIRLDCFTHCLIVKCTADILLLDTLLGTLVKELQNKYTPGRREEAIAVTMRFLRSVARVFVILSVEMASSKKKNNFIPQPIGKCKRVFQALLPYAVEELCNVAESLIVPVRMGIARPTAPFTLASTSIDAMQGSEELFSVEPLPPRPSSDQSSSSSQSQSSYIIRNPQQRRISQSQPVRGRDEEQDDIVSADVEEVEVVEGVAGEEDHHDEQEEHGEENAEAEGQHDEHDEDGSDMELDLLAAAETESDSESNHSNQDNASGRRSVVTAATAGSEAGASSVPAFFSEDDSQSNDSSDSDSSSSQSDDIEQETFMLDEPLERTTNSSHANGAAQAPRSMQWAVRNTQHQRAASTAPSSTSTPAASSAGLIYIDPSNLRRSGTISTSAAAAAAALEASNASSYLTSASSLARAYSIVIRQISDLMGLIPKYNHLVYSQIPAAVKLTYQDAVNLQNYVEEKLIPTWNWMVSIMDSTEAQLRYGSALASAGDPGHPNHPLHASQNSARRERMTAREEASLRTLEGRRRATLLSARQGMMSARGDFLNYALSLMRSHNDEHSDVLPVLDVCSLKHVAYVFQALIYWIKAMNQQTTLDTPQLERKRTRELLELGIDNEDSEHENDDDTNQSATLNDKDDDSLPAETGQNHPFFRRSDSMTFLGCIPPNPFEVPLAEAIPLADQPHLLQPNARKEDLFGRPSQGLYSSSASSGKCLMEVTVDRNCLEVLPTKMSYAANLKNVMNMQNRQKKEGEEQPVLPEETESSKPGPSAHDLAAQLKSSLLAEIGLTESEGPPLTSFRPQCSFMGMVISHDMLLGRWRLSLELFGRVFMEDVGAEPGSILTELGGFEVKESKFRREMEKLRNQQSRDLSLEVDRDRDLLIQQTMRQLNNHFGRRCATTPMAVHRVKVTFKDEPGEGSGVARSFYTAIAQAFLSNEKLPNLECIQNANKGTHTSLMQRLRNRGERDREREREREMRRSSGLRAGSRRDRDRDFRRQLSIDTRPFRPASEGNPSDDPEPLPAHRQALGERLYPRVQAMQPAFASKITGMLLELSPAQLLLLLASEDSLRARVDEAMELIIAHGRENGADSILDLGLVDSSEKVQQENRKRHGSSRSVVDMDLDDTDDGDDNAPLFYQPGKRGFYTPRPGKNTEARLNCFRNIGRILGLCLLQNELCPITLNRHVIKVLLGRKVNWHDFAFFDPVMYESLRQLILASQSSDADAVFSAMDLAFAIDLCKEEGGGQVELIPNGVNIPVTPQNVYEYVRKYAEHRMLVVAEQPLHAMRKGLLDVLPKNSLEDLTAEDFRLLVNGCGEVNVQMLISFTSFNDESGENAEKLLQFKRWFWSIVEKMSMTERQDLVYFWTSSPSLPASEEGFQPMPSITIRPPDDQHLPTANTCISRLYVPLYSSKQILKQKLLLAIKTKNFGFV

SEQ ID NO: 196 - protein, 2828 aa, Homo sapiens
MPKRAHWGALSVVLILLWGHPRVALACPHPCACYVPSEVHCTFRSLASVPAGIAKHVERINLGFNSIQALSETSFAGLTKLELLMIHGNEIPSIPDGALRDLSSLQVFKFSYNKLRVITGQTLQGLSNLMRLHIDHNKIEFIHPQAFNGLTSLRLLHLEGNLLHQLHPSTFSTFTFLDYFRLSTIRHLYLAENMVRTLPASMLRNMPLLENLYLQGNPWTCDCEMRWFLEWDAKSRGILKCKKDKAYEGGQLCAMCFSPKKLYKHEIHKLKDMTCLKPSIESPLRQNRSRSIEEEQEQEEDGGSQLILEKFQLPQWSISLNMTDEHGNMVNLVCDIKKPMDVYKIHLNQTDPPDIDINATVALDFECPMTRENYEKLWKLIAYYSEVPVKLHRELMLSKDPRVSYQYRQDADEEALYYTGVRAQILAEPEWVMQPSIDIQLNRRQSTAKKVLLSYYTQYSQTISTKDTRQARGRSWVMIEPSGAVQRDQTVLEGGPCQLSCNVKASESPSIFWVLPDGSILKAPMDDPDSKFSILSSGWLRIKSMEPSDSGLYQCIAQVRDEMDRMVYRVLVQSPSTQPAEKDTVTIGKNPGESVTLPCNALAIPEAHLSWILPNRRIINDLANTSHVYMLPNGTLSIPKVQVSDSGYYRCVAVNQQGADHFTVGITVTKKGSGLPSKRGRRPGAKALSRVREDIVEDEGGSGMGDEENTSRRLLHPKDQEVFLKTKDDAINGDKKAKKGRRKLKLWKHSEKEPETNVAEGRRVFESRRRINMANKQINPERWADILAKVRGKNLPKGTEVPPLIKTTSPPSLSLEVTPPFPAISPPSASPVQTVTSAEESSADVPLLGEEEHVLGTISSASMGLEHNHNGVILVEPEVTSTPLEEVVDDLSEKTEEITSTEGDLKGTAAPTLISEPYEPSPTLHTLDTVYEKPTHEETATEGWSAADVGSSPEPTSSEYEPPLDAVSLAESEPMQYFDPDLETKSQPDEDKMKEDTFAHLTPTPTIWVNDSSTSQLFEDSTIGEPGVPGQSHLQGLTDNIHLVKSSLSTQDTLLIKKGMKEMSQTLQGGNMLEGDPTHSRSSESEGQESKSITLPDSTLGIMSSMSPVKKPAETTVGTLLDKDTTTATTTPRQKVAPSSTMSTHPSRRRPNGRRRLRPNKFRHRHKQTPPTTFAPSETFSTQPTQAPDIKISSQVESSLVPTAWVDNTVNTPKQLEMEKNAEPTSKGTPRRKHGKRPNKHRYTPSTVSSRASGSKPSPSPENKHRNIVTPSSETILLPRTVSLKTEGPYDSLDYMTTTRKIYSSYPKVQETLPVTYKPTSDGKEIKDDVATNVDKHKSDILVTGESITNAIPTSRSLVSTMGEFKEESSPVGFPGTPTWNPSRTAQPGRLQTGIPVTTSGENLTDPPLLKELEDVDFTSEFLSSLTVSTPFHQEEAGSSTTLSSIKVEVASSQAETTTLDQDHLETTVAILLSETRPQNHTPTAARMKEPASSSPSTILMSLGQTTTTKPALPSPRISQASRDSKENVFLNYVGNPETEATPVNNEGTQHMSGPNELSTPSSDQDAFNLSTKLELEKQVFGSRSLPRGPDSQRQDGRVHASHQLTRVPAKPILPTATVRLPEMSTQSASRYFVTSQSPRHWTNKPEITTYPSGALPENKQFTTPRLSSTTIPLPLHMSKPSIPSKFTDRRTDQFNGYSKVFGNNNIPEARNPVGKPPSPRIPHYSNGRLPFFTNKTLSFPQLGVTRRPQIPTSPAPVMRERKVIPGSYNRIHSHSTFHLDFGPPAPPLLHTPQTTGSPSTNLQNIPMVSSTQSSISFITSSVQSSGSFHQSSSKFFAGGPPASKFWSLGEKPQILTKSPQTVSVTAETDTVFPCEATGKPKPFVTWTKVSTGALMTPNTRIQRFEVLKNGTLVIRKVQVQDRGQYMCTASNLHGLDRMVVLLSVTVQQPQILASHYQDVTVYLGDTIAMECLAKGTPAPQISWIFPDRRVWQTVSPVEGRITLHENRTLSIKEASFSDRGVYKCVASNAAGADSLAIRLHVAALPPVIHQEKLENISLPPGLSIHIHCTAKAAPLPSVRWVLGDGTQIRPSQFLHGNLFVFPNGTLYIRNLAPKDSGRYECVAANLVGSARRTVQLNVQRAAANARITGTSPRRTDVRYGGTLKLDCSASGDPWPRILWRLPSKRMIDALFSFDSRIKVFANGTLVVKSVTDKDAGDYLCVARNKVGDDYVVLKVDVVMKPAKIEHKEENDHKVFYGGDLKVDCVATGLPNPEISWSLPDGSLVNSFMQSDDSGGRTKRYVVFNNGTLYFNEVGMREEGDYTCFAENQVGKDEMRVRVKVVTAPATIRNKTYLAVQVPYGDVVTVACEAKGEPMPKVTWLSPTNKVIPTSSEKYQIYQDGTLLIQKAQRSDSGNYTCLVRNSAGEDRKTVWIHVNVQPPKINGNPNPITTVREIAAGGSRKLIDCKAEGIPTPRVLWAFPEGVVLPAPYYGNRITVHGNGSLDIRSLRKSDSVQLVCMARNEGGEARLILQLTVLEPMEKPIFHDPISEKITAMAGHTISLNCSAAGTPTPSLVWVLPNGTDLQSGQQLQRFYHKADGMLHISGLSSVDAGAYRCVARNAAGHTERLVSLKVGLKPEANKQYHNLVSIINGETLKLPCTPPGAGQGRFSWTLPNGMHLEGPQTLGRVSLLDNGTLTVREASVFDRGTYVCRMETEYGPSVTSIPVIVIAYPPRITSEPTPVIYTRPGNTVKLNCMAMGIPKADITWELPDKSHLKAGVQARLYGNRFLHPQGSLTIQHATQRDAGFYKCMAKNILGSDSKTTYIHVF

SEQ ID NO: 197 - protein, 3051 aa, Homo sapiens
MATNPQPQPPPPAPPPPPPQPQPQPPPPPPGPGAGPGAGGAGGAGAGAGDPQLVAMIVNHLKSQGLFDQFRRDCLADVDTKPAYQNLRQRVDNFVANHLATHTWSPHLNKNQLRNNIRQQVLKSGMLESGIDRIISQVVDPKINHTFRPQVEKAVHEFLATLNHKEEGSGNTAPDDEKPDTSLITQGVPTPGPSANVANDAMSILETITSLNQEASAARASTETSNAKTSERASKKLPSQPTTDTSTDKERTSEDMADKEKSTADSGGEGLETAPKSEEFSDLPCPVEEIKNYTKEHNNLILLNKDVQQESSEQKNKSTDKGEKKPDSNEKGERKKEKKEKTEKKFDHSKKSEDTQKVKDEKQAKEKEVESLKLPSEKNSNKAKTVEGTKEDFSLIDSDVDGLTDITVSSVHTSDLSSFEEDTEEEVVTSDSMEEGEITSDDEEKNKQNKTKTQTSDSSEGKTKSVRHAYVHKPYLYSKYYSDSDDELTVEQRRQSIAKEKEERLLRRQINREKLEEKRKQKAEKTKSSKTKGQGRSSVDLEESSTKSLEPKAARIKEVLKERKVLEKKVALSKKRKKDSRNVEENSKKKQQYEEDSKETLKTSEHCEKEKISSSKELKHVHAKSEPSKPARRLSESLHVVDENKNESKLEREHKRRTSTPVIMEGVQEETDTRDVKRQVERSEICTEEPQKQKSTLKNEKHLKKDDSETPHLKSLLKKEVKSSKEKPEREKTPSEDKLSVKHKYKGDCMHKTGDETELHSSEKGLKVEENIQKQSQQTKLSSDDKTERKSKHRNERKLSVLGKDGKPVSEYIIKTDENVRKENNKKERRLSAEKTKAEHKSRRSSDSKIQKDSLGSKQHGITLQRRSESYSEDKCDMDSTNMDSNLKPEEVVHKEKRRTKSLLEEKLVLKSKSKTQGKQVKVVETELQEGATKQATTPKPDKEKNTEENDSEKQRKSKVEDKPFEETGVEPVLETASSSAHSTQKDSSHRAKLPLAKEKYKSDKDSTSTRLERKLSDGHKSRSLKHSSKDIKKKDENKSDDKDGKEVDSSHEKARGNSSLMEKKLSRRLCENRRGSLSQEMAKGEEKLAANTLSTPSGSSLQRPKKSGDMTLIPEQEPMEIDSEPGVENVFEVSKTQDNRNNNSQQDIDSENMKQKTSATVQKDELRTCTADSKATAPAYKPGRGTGVNSNSEKHADHRSTLTKKMHIQSAVSKMNPGEKEPIHRGTTEVNIDSETVHRMLLSAPSENDRVQKNLKNTAAEEHVAQGDATLEHSTNLDSSPSLSSVTVVPLRESYDPDVIPLFDKRTVLEGSTASTSPADHSALPNQSLTVRESEVLKTSDSKEGGEGFTVDTPAKASITSKRHIPEAHQATLLDGKQGKVIMPLGSKLTGVIVENENITKEGGLVDMAKKENDLNAEPNLKQTIKATVENGKKDGIAVDHVVGLNTEKYAETVKLKHKRSPGKVKDISIDVERRNENSEVDTSAGSGSAPSVLHQRNGQTEDVATGPRRAEKTSVATSTEGKDKDVTLSPVKAGPATTTSSETRQSEVALPCTSIEADEGLIIGTHSRNNPLHVGAEASECTVFAAAEEGGAVVTEGFAESETFLTSTKEGESGECAVAESEDRAADLLAVHAVKIEANVNSVVTEEKDDAVTSAGSEEKCDGSLSRDSEIVEGTITFISEVESDGAVTSAGTEIRAGSISSEEVDGSQGNMMRMGPKKETEGTVTCTGAEGRSDNFVICSVTGAGPREERMVTGAGVVLGDNDAPPGTSASQEGDGSVNDGTEGESAVTSTGITEDGEGPASCTGSEDSSEGFAISSESEENGESAMDSTVAKEGTNVPLVAAGPCDDEGIVTSTGAKEEDEEGEDVVTSTGRGNEIGHASTCTGLGEESEGVLICESAEGDSQIGTVVEHVEAEAGAAIMNANENNVDSMSGTEKGSKDTDICSSAKGIVESSVTSAVSGKDEVTPVPGGCEGPMTSAASDQSDSQLEKVEDTTISTGLVGGSYDVLVSGEVPECEVAHTSPSEKEDEDIITSVENEECDGLMATTASGDITNQNSLAGGKNQGKVLIISTSTTNDYTPQVSAITDVEGGLSDALRTEENMEGTRVTTEEFEAPMPSAVSGDDSQLTASRSEEKDECAMISTSIGEEFELPISSATTIKCAESLQPVAAAVEERATGPVLISTADFEGPMPSAPPEAESPLASTSKEEKDECALISTSIAEECEASVSGVVVESENERAGTVMEEKDGSGIISTSSVEDCEGPVSSAVPQEEGDPSVTPAEEMGDTAMISTSTSEGCEAVMIGAVLQDEDRLTITRVEDLSDAAIISTSTAECMPISASIDRHEENQLTADNPEGNGDLSATEVSKHKVPMPSLIAENNCRCPGPVRGGKEPGPVLAVSTEEGHNGPSVHKPSAGQGHPSAVCAEKEEKHGKECPEIGPFAGRGQKESTLHLINAEEKNVLLNSLQKEDKSPETGTAGGSSTASYSAGRGLEGNANSPAHLRGPEQTSGQTAKDPSVSIRYLAAVNTGAIKADDMPPVQGTVAEHSFLPAEQQGSEDNLKTSTTKCITGQESKIAPSHTMIPPATYSVALLAPKCEQDLTIKNDYSGKWTDQASAEKTGDDNSTRKSFPEEGDIMVTVSSEENVCDIGNEESPLNVLGGLKLKANLKMEAYVPSEEEKNGEILAPPESLCGGKPSGIAELQREPLLVNESLNVENSGFRTNEEIHSESYNKGEISSGRKDNAEAISGHSVEADPKEVEEEERHMPKRKRKQHYLSSEDEPDDNPDVLDSRIETAQRQCPETEPHDTKEENSRDLEELPKTSSETNSTTSRVMEEKDEYSSSETTGEKPEQNDDDTIKSQEEDQPIIIKRKRGRPRKYPVETTLKMKDDSKTDTGIVTVEQSPSSSKLKVMQTDESNKETANLQERSISNDDGEEKIVTSVRRRGRKPKRSLTVSDDAESSEPERKRQKSVSDPVEDKKEQESDEEEEEEEEDEPSGATTRSTTRSEAQRSKTQLSPSIKRKREVSPPGARTRGQQRVEEAPVKKAKR

SEQ ID NO: 198 - protein, 1499 aa, Homo sapiens
MMANWAEARPLLILIVLLGQFVSIKAQEEDEDEGYGEEIACTQNGQMYLNRDIWKPAPCQICVCDNGAILCDKIECQDVLDCADPVTPPGECCPVCSQTPGGGNTNFGRGRKGQKGEPGLVPVVTGIRGRPGPAGPPGSQGPRGERGPKGRPGPRGPQGIDGEPGVPGQPGAPGPPGHPSHPGPDGLSRPFSAQMAGLDEKSGLGSQVGLMPGSVGPVGPRGPQGLQGQQGGAGPTGPPGEPGDPGPMGPIGSRGPEGPPGKPGEDGEPGRNGNPGEVGFAGSPGARGFPGAPGLPGLKGHRGHKGLEGPKGEVGAPGSKGEAGPTGPMGAMGPLGPRGMPGERGRLGPQGAPGQRGAHGMPGKPGPMGPLGIPGSSGFPGNPGMKGEAGPTGARGPEGPQGQRGETGPPGPVGSPGLPGAIGTDGTPGAKGPTGSPGTSGPPGSAGPPGSPGPQGSTGPQGIRGQPGDPGVPGFKGEAGPKGEPGPHGIQGPIGPPGEEGKRGPRGDPGTVGPPGPVGERGAPGNRGFPGSDGLPGPKGAQGERGPVGSSGPKGSQGDPGRPGEPGLPGARGLTGNPGVQGPEGKLGPLGAPGEDGRPGPPGSIGIRGQPGSMGLPGPKGSSGDPGKPGEAGNAGVPGQRGAPGKDGEVGPSGPVGPPGLAGERGEQGPPGPTGFQGLPGPPGPPGEGGKPGDQGVPGDPGAVGPLGPRGERGNPGERGEPGITGLPGEKGMAGGHGPDGPKGSPGPSGTPGDTGPPGLQGMPGERGIAGTPGPKGDRGGIGEKGAEGTAGNDGARGLPGPLGPPGPAGPTGEKGEPGPRGLVGPPGSRGNPGSRGENGPTGAVGFAGPQGPDGQPGVKGEPGEPGQKGDAGSPGPQGLAGSPGPHGPNGVPGLKGGRGTQGPPGATGFPGSAGRVGPPGPAGAPGPAGPLGEPGKEGPPGLRGDPGSHGRVGDRGPAGPPGGPGDKGDPGEDGQPGPDGPPGPAGTTGQRGIVGMPGQRGERGMPGLPGPAGTPGKVGPTGATGDKGPPGPVGPPGSNGPVGEPGPEGPAGNDGTPGRDGAVGERGDRGDPGPAGLPGSQGAPGTPGPVGAPGDAGQRGDPGSRGPIGPPGRAGKRGLPGPQGPRGDKGDHGDRGDRGQKGHRGFTGLQGLPGPPGPNGEQGSAGIPGPFGPRGPPGPVGPSGKEGNPGPLGPIGPPGVRGSVGEAGPEGPPGEPGPPGPPGPPGHLTAALGDIMGHYDESMPDPLPEFTEDQAAPDDKNKTDPGVHATLKSLSSQIETMRSPDGSKKHPARTCDDLKLCHSAKQSGEYWIDPNQGSVEDAIKVYCNMETGETCISANPSSVPRKTWWASKSPDNKPVWYGLDMNRGSQFAYGDHQSPNTAITQMTFLRLLSKEASQNITYICKNSVGYMDDQAKNLKKAVVLKGANDLDIKAEGNIRFRYIVLQDTCSKRNGNVGKTVFEYRTQNVARLPIIDLAPVDVGGTDQEFGVEIGPVCFV

SEQ ID NO: 199 - protein, 4074 aa, Homo sapiens
MTAWLISLMSIEVLLLAVRHLSLHIEPEEGSLAGGTWITVIFDGLELGVLYPNNGSQLEIHLVNVNMVVPALRSVPCDVFPVFLDLPVVTCRTRSVLSEAHEGLYFLEAYFGGQLVSSPNPGPRDSCTFKFSKAQTPIVHQVYPPSGVPGKLIHVYGWIITGRLETFDFDAEYIDSPVILEAQGDKWVTPCSLINRQMGSCYPIQEDHGLGTLQCHVEGDYIGSQNVSFSVFNKGKSMVHKKAWLISAKQDLFLYQTHSEILSVFPETGSLGGRTNITITGDFFDNSAQVTIAGIPCDIRHVSPRKIECTTRAPGKDVRLTTPQPGNRGLLFEVGDAVEGLELTEATPGYRWQIVPNASSPFGFWSQEGQPFRARLSGFFVAPETNNYTFWIQADSQASLHFSWSEEPRTKVKVASISVGTADWFDSWEQNRDEGTWQQKTPKLELLGGAMYYLEAEHHGIAPSRGMRIGVQIHNTWLNPDVVTTYLREKHQIRVRAQRLPEVQVLNVSGRGNFFLTWDNVSSQPIPANATAHLIQTTIEELLAVKCKLEPLWSNILLRLGFERGPEVSNSDGDLTSGTEPFCGRFSLRQPRHLVLTPPAAQKGYRLDQYTHLCLAYKGHMNKILKMIVSFTIGFQNMVKNTTCDWSLTRTSPESWQFDCTDLWETCVRCFGDLQPPPANSPVLVHQINLLPLAQETGLFYVDEIIIADTNVTVSQADSGTARPGGNLVESVSVVGSPPVYSVTSWLAGCGTELPLITARSVPTEGTEEGSGLVLVTTQRRQRTSPPLGGHFRIQLPNTVISDVPVQISAHHLHQLLQNNADDFTSRYLNASDFTVKEDLYTCYEHVWTLSWSTQIGDLPNFIRVSDENLTGVNPAAATRVVYDGGVFLGPIFGDMLATANQHTQVVVRVNDVPAHCPGSCSFQYLQGSTPCVHSVWYSIDGDINLMIYITGTGFSGDSQFLQVTVNKTSCKVIFSNQTNVVCQTDLLPVGMHRILMLVRPSGLAISATGEDLFLNVKPRLDMVEPSRAADIGGLWATIRGSSLEGVSLILFGSYSCAINVATSNSSRIQCKVPPRGKDGRIVNVTVIRGDYSAVLPRAFTYVSSLNPVIVTLSRNISNIAGGETLVIGVARLMNYTDLDVEVHVQDALAPVHTQSAWGLEVALPPLPAGLHRISVSINGVSIHSQGVDLHIQYLTEVFSIEPCCGSLLGGTILSISGIGFSRDPALVWVLVGNRSCDIVNLTEASIWCETLPAPQIPDAGAPTVPAAVEVWAGNRFFARGPSPSLVGKGFTFMYEAAATPVVTAMQGEITNSSLSLHVGGSNLSNSVILLGNLNCDVETQSFQGNVSLSGCSIPLHSLEAGIYPLQVRQKQMGFANMSVVLQQFAVMPRIMAIFPSQGSACGGTILTVRGLLLNSRRRSVRVDLSGPFTCVILSLGDHTILCQVSLEGDPLPGASFSLNVTVLVNGLTSECQGNCTLFIREEASPVMDALSTNTSGSLTTVLIRGQRLATTADEPMVFVDDQLPCNVTFFNASHVVCQTRDLAPGPHYLSVFYTRNGYACSGNVSRHFYIMPQVFHYFPKNFSLHGGSLLTIEGTGLRGQNTTSVYIDQQTCLTVNIGAELIRCIVPTGNGSVALEIEVDGLWYHIGVIGYNKAFTPELISISQSDDILTFAVAQISGAANIDIFIGMSPCVGVSGNHTVLQCVVPSLPAGEYHVRGYDCIRGWASSALVFTSRVIITAVTENFGCLGGRLVHVFGAGFSPGNVSAAVCGAPCRVLANATVSAFSCLVLPLDVSLAFLCGLKREEDSCEAARHTYVQCDLTVAMATEQLLESWPYLYICEESSQCLFVPDHWAESMFPSFSGLFISPKLERDEVLIYNSSCNITMETEAEMECETPNQPITVKITEIRKRWGQNTQGNFSLQFCRRWSRTHSWFPERLPQDGDNVTVENGQLLLLDTNTSILNLLHIKGGKLIFMAPGPIELRAHAILVSDGGELRIGSEDKPFQGRAQITLYGSSYSTPFFPYGVKFLAVRNGTLSLHGSLPEVIVTCLRATAHALDTVLALEDAVDWNPGDEVVIISGTGVKGAKPMEEIVTVETVQDTDLYLKSPLRYSHNFTENWVAGEHHILKATVALLSRSITIQGNLTNEREKLLVSCQEANAPEGNLQHCLYSMSEKMLGSRDMGARVIVQSFPEEPSQVQLKGVQFQVLGQAFHKHLSSLTLVGAMRESFIQGCTVRNSFSRGLSMCGTLGLKVDSNVFYNILGHALLVGTCTEMRYISWEAIHGRKDDWSGHGNIIRNNVIIQVSGAEGLSNPEMLTPSGIYICSPTNVIEGNRVCGAGYGYFFHLMTNQTSQAPLLSFTQNIAHSCTRYGLFVYPKFQPPWDNVTGTTLFQSFTVWESAGGAQIFRSSNLRLKNFKVYSCRDFGIDVLESDANTSVTDSLLLGHFAHKGSLCMSSGIKTPKRWELMVSNTTFVNFDLINCVAIRTCSDCSQGQGGFTVKTSQLKFTNSSNLVAFPFPHAAILEDLDGSLSGKNRSHILASMETLSASCLVNSSFGRVVHGSACGGGVLFHRMSIGLANTPEVSYDLTMTDSRNKTTTVNYVRDTLSNPRGWMALLLDQETYSLQSENLWINRSLQYSATFDNFAPGNYLLLVHTDLPPYPDILLRCGSRVGLSFPFLPSPGQNQGCDWFFNSQLRQLTYLVSGEGQVQVILRVKEGMPPTISASTSAPESALKWSLPETWQGVEEGWGGYNNTIPGPGDDVLILPNRTVLVDTDLPFFKGLYVMGTLDFPVDRSNVLSVACMVIAGGELKVGTLENPLEKEQKLLILLRASEGVFCDRMNGIHIDPGTIGVYGKVHLYSAYPKNSWTHLGADIASGNERIIVEDAVDWRPHDKIVLSSSSYEPHEAEVLTVKEVKGHHVRIYERLKHRHIGSVHVTEDGRHIRLAAEVGLLTRNIQIQPDVSCRGRLFVGSFRKSSREEFSGVLQLLNVEIQNFGSPLYSSVEFSNVSAGSWIISSTLHQSCGGGIHAAASHGVLLNDNIVFGTAGHGIDLEGQAYTVTNNLVVLMTQPAWSTIWVAGIKVNQVKDINLHGNVVAGSERLGFHIRGHKCSSCELLWSDNVAHSSLHGLHLYKESGLDNCTRISGFLAFKNFDYGAMLHVENSVEIENITLVDNTIGLLAVVYVFSAPQNSVKKVQIVLRNSVIVATSSSFDCIQDKVKPHSANLTSTDRAPSNPRGGRIGILWPVFTSEPNQWPQEPWHKVRNDHSISGIMKLQDVTFSSFVKSCYSDDLDVCILPNAENSGIMHPITAERTRMLKIKDKNKFYFPSLQPRKDLGKVVCPELDCASPRKYLFKDLDGRALGLPPPVSVFPKTEAEWTASFFNAGTFREEQKCTYQFLMQGFICKQTDQVVLILDSADAIWAIQKLYPVVSVTSGFVDVFSSVNANIPCSTSGSVSTFYSILPIRQITKVCFMDQTPQVLRFFLLGNKSTSKLLLAVFYHELQSPHVFLGESFIPPTLVQSASLLLNESIGANYFNIMDNLLYVVLQGEEPIEIRSGVSIHLALTVMVSVLEKGWEIVILERLTNFLQIGQNQIRFIHEMPGHEETLKAIADSRAKRKRNCPTVTCTSHYRRVGQRRPLMMEMNSHRASPPMTVETISKVIVIEIGDSPTVRSTGMISSLSSNKLQNLAHRVITAQQTGVLENVLNMTIGALLVTQSKGVIGYGNTSSFKTGNLIYIRPYALSILVQPSDGEVGNELPVQPQLVFLDEQNRRVESLGPPSEPWTISASLEGASDSVLKGCTQAETQDGYVSFYNLAVLISGSNWHFIFTVTSPPGVNFTARSKPFAVLPVTRKEKSTIILAASLSSVASWLALSCLVCCWLKRSKSRKTKPEEIPESQTNNQNIHIHISSKRRESQGPKKEDTVVGEDMRMKVMLGKVNQCPHQLMNGVSRRKVSRHIVREEEAAVPAPGTTGITSHGHICAPGAPAQQVYLQETGNWKEGQEQLLRYQLAGQNQLLLLCPDFRQERQQLPGQSRLSKQSGSLGLSQEKKASCGATEAFCLHSVHPETIQEQL

SEQ ID NO: 200 - protein, 4374 aa, Homo sapiens
MKVDRTKLKKTPTEAPADCRALIDKLKVCNDEQLLLELQQIKTWNIGKCELYHWVDLLDRFDGILADAGQTVENMSWMLVCDRPEREQLKMLLLAVLNFTALLIEYSFSRHLYSSIEHLTTLLASSDMQVVLAVLNLLYVFSKRSNYITRLGSDKRTPLLTRLQHLAESWGGKENGFGLAECCRDLHMMKYPPSATTLHFEFYADPGAEVKIEKRTTSNTLHYIHIEQLDKISESPSEIMESLTKMYSIPKDKQMLLFTHIRLAHGFSNHRKRLQAVQARLHAISILVYSNALQESANSILYNGLIEELVDVLQITDKQLMEIKAASLRTLTSIVHLERTPKLSSIIDCTGTASYHGFLPVLVRNCIQAMIDPSMDPYPHQFATALFSFLYHLASYDAGGEALVSCGMMEALLKVIKFLGDEQDQITFVTRAVRVVDLITNLDMAAFQSHSGLSIFIYRLEHEVDLCRKECPFVIKPKIQRPNTTQEGEEMETDMDGVQCIPQRAALLKSMLNFLKKAIQDPAFSDGIRHVMDGSLPTSLKHIISNAEYYGPSLFLLATEVVTVFVFQEPSLLSSLQDNGLTDVMLHALLIKDVPATREVLGSLPNVFSALCLNARGLQSFVQCQPFERLFKVLLSPDYLPAMRRRRSSDPLGDTASNLGSAVDELMRHQPTLKTDATTAIIKLLEEICNLGRDPKYICQKPSIQKADGTATAPPPRSNHAAEEASSEDEEEEEVQAMQSFNSTQQNETEPNQQVVGTEERIPIPLMDYILNVMKFVESILSNNTTDDHCQEFVNQKGLLPLVTILGLPNLPIDFPTSAACQAVAGVCKSILTLSHEPKVLQEGLLQLDSILSSLEPLHRPIESPGGSVLLRELACAGNVADATLSAQATPLLHALTAAHAYIMMFVHTCRVGQSEIRSISVNQWGSQLGLSVLSKLSQLYCSLVWESTVLLSLCTPNSLPSGCEFGQADMQKLVPKDEKAGTTQGGKRSDGEQDGAAGSMDASTQGLLEGIGLDGDTLAPMETDEPTASDSKGKSKITPAMAARIKQIKPLLSASSRLGRALAELFGLLVKLCVGSPVRQRRSHHAASTTTAPTPAARSTASALTKLLTKGLSWQPPPYTPTPRFRLTFFICSVGFTSPMLFDERKYPYHLMLQKFLCSGGHNALFETFNWALSMGGKVPVSEGLEHSDLPDGTGEFLDAWLMLVEKMVNPTTVLESPHSLPAKLPGGVQNFPQFSALRFLVVTQKAAFTCIKNLWNRKPLKVYGGRMAESMLAILCHILRGEPVIRERLSKEKEGSRGEEDTGQEEGGSRREPQVNQQQLQQLMDMGFTREHAMEALLNTSTMEQATEYLLTHPPPIMGGVVRDLSMSEEDQMMRAIAMSLGQDIPMDQRAESPEEVACRKEEEERKAREKQEEEEAKCLEKFQDADPLEQDELHTFTDTMLPGCFHLLDELPDTVYRVCDLIMTAIKRNGADYRDMILKQVVNQVWEAADVLIKAALPLTTSDTKTVSEWISQMATLPQASNLATRILLLTLLFEELKLPCAWVVESSGILNVLIKLLEVVQPCLQAAKEQKEVQTPKWITPVLLLIDFYEKTAISSKRRAQMTKYLQSNSNNWRWFDDRSGRWCSYSASNNSTIDSAWKSGETSVRFTAGRRRYTVQFTTMVQVNEETGNRRPVMLTLLRVPRLNKNSKNSNGQELEKTLEESKEMDIKRKENKGNDTPLALESTNTEKETSLEETKIGEILIQGLTEDMVTVLIRACVSMLGVPVDPDTLHATLRLCLRLTRDHKYAMMFAELKSTRMILNLTQSSGFNGFTPLVTLLLRHIIEDPCTLRHTMEKVVRSAATSGAGSTTSGVVSGSLGSREINYILRVLGPAACRNPDIFTEVANCCIRIALPAPRGSGTASDDEFENLRIKGPNAVQLVKTTPLKPSPLPVIPDTIKEVIYDMLNALAAYHAPEEADKSDPKPGVMTQEVGQLLQDMGDDVYQQYRSLTRQSSDFDTQSGFSINSQVFAADGASTETSASGTSQGEASTPEESRDGKKDKEGDRASEEGKQKGKGSKPLMPTSTILRLLAELVRSYVGIATLIANYSYTVGQSELIKEDCSVLAFVLDHLLPHTQNAEDKDTPALARLFLASLAAAGSGTDAQVALVNEVKAALGRALAMAESTEKHARLQAVMCIISTIMESCPSTSSFYSSATAKTQHNGMNNIIRLFLKKGLVNDLARVPHSLDLSSPNMANTVNAALKPLETLSRIVNQPSSLFGSKSASSKNKSEQDAQGASQDSSSNQQDPGEPGEAEVQEEDHDVTQTEVADGDIMDGEAETDSVVIAGQPEVLSSQEMQVENELEDLIDELLERDGGSGNSTIIVSRSGEDESQEDVLMDEAPSNLSQASTLQANREDSMNILDPEDEEEHTQEEDSSGSNEDEDDSQDEEEEEEEDEEDDQEDDEGEEGDEDDDDDGSEMELDEDYPDMNASPLVRFERFDREDDLIIEFDNMFSSATDIPPSPGNIPTTHPLMVRHADHSSLTLGSGSSTTRLTQGIGRSQRTLRQLTANTGHTIHVHYPGNRQPNPPLILQRLLGPSAAADILQLSSSLPLQSRGRARLLVGNDDVHIIARSDDELLDDFFHDQSTATSQAGTLSSIPTALTRWTEECKVLDAESMHDCVSVVKVSIVNHLEFLRDEELEERREKRRKQLAEEETKITDKGKEDKENRDQSAQCTASKSNDSTEQNLSDGTPMPDSYPTTPSSTDAATSESKETLGTLQSSQQQPTLPTPPALGEVPQELQSPAGEGGSSTQLLMPVEPEELGPTRPSGEAETTQMELSPAPTITSLSPERAEDSDALTAVSSQLEGSPMDTSSLASCTLEEAVGDTSAAGSSEQPRAGSSTPGDAPPAVAEVQGRSDGSGESAQPPEDSSPPASSESSSTRDSAVAISGADSRGILEEPLPSTSSEEEDPLAGISLPEGVDPSFLAALPDDIRREVLQNQLGIRPPTRTAPSTNSSAPAVVGNPGVTEVSPEFLAALPPAIQEEVLAQQRAEQQRRELAQNASSDTPMDPVTFIQTLPSDLRRSVLEDMEDSVLAVMPPDIAAEAQALRREQEARQRQLMHERLFGHSSTSALSAILRSPAFTSRLSGNRGVQYTRLAVQRGGTFQMGGSSSHNRPSGSNVDTLLRLRGRLLLDHEALSCLLVLLFVDEPKLNTSRLHRVLRNLCYHAQTRHWVIRSLLSILQRSSESELCIETPKLTTSEEKGKKSSKSCGSSSHENRPLDLLHKMESKSSNQLSWLSVSMDAALGCRTNIFQIQRSGGRKHTEKHASGGSTVHIHPQAAPVVCRHVLDTLIQLAKVFPSHFTQQRTKETNCESDRERGNKACSPCSSQSSSSGICTDFWDLLVKLDNMNVSRKGKNSVKSVPVSAGGEGETSPYSLEASPLGQLMNMLSHPVIRRSSLLTEKLLRLLSLISIALPENKVSEAQANSGSGASSTTTATSTTSTTTTTAASTTPTPPTAPTPVTSAPALVAATAISTIVVAASTTVTTPTTATTTVSISPTTKGSKSPAKVSDGGSSSTDFKMVSSGLTENQLQLSVEVLTSHSCSEEGLEDAANVLLQLSRGDSGTRDTVLKLLLNGARHLGYTLCKQIGTLLAELREYNLEQQRRAQCETLSPDGLPEEQPQTTKLKGKMQSRFDMAENVVIVASQKRPLGGRELQLPSMSMLTSKTSTQKFFLRVLQVIIQLRDDTRRANKKAKQTGRLGSSGLGSASSIQAAVRQLEAEADAIIQMVREGQRARRQQQAATSESSQSEASVRREESPMDVDQPSPSAQDTQSIASDGTPQGEKEKEERPPELPLLSEQLSLDELWDMLGECLKELEESHDQHAVLVLQPAVEAFFLVHATERESKPPVRDTRESQLAHIKDEPPPLSPAPLTPATPSSLDPFFSREPSSMHISSSLPPDTQKFLRFAETHRTVLNQILRQSTTHLADGPFAVLVDYIRVLDFDVKRKYFRQELERLDEGLRKEDMAVHVRRDHVFEDSYRELHRKSPEEMKNRLYIVFEGEEGQDAGGLLREWYMIISREMFNPMYALFRTSPGDRVTYTINPSSHCNPNHLSYFKFVGRIVAKAVYDNRLLECYFTRSFYKHILGKSVRYTDMESEDYHFYQGLVYLLENDVSTLGYDLTFSTEVQEFGVCEVRDLKPNGANILVTEENKKEYVHLVCQMRMTGAIRKQLAAFLEGFYEIIPKRLISIFTEQELELLISGLPTIDIDDLKSNTEYHKYQSNSIQIQWFWRALRSFDQADRAKFLQFVTGTSKVPLQGFAALEGMNGIQKFQIHRDDRSTDRLPSAHTCFNQLDLPAYESFEKLRHMLLLAIQECSEGFGLA

SEQ ID NO: 201 - protein, 3114 aa, Homo sapiens
MSWALEEWKEGLPTRALQKIQELEGQLDKLKKEKQQRQFQLDSLEAALQKQKQKVENEKTEGTNLKRENQRLMEICESLEKTKQKISHELQVKESQVNFQEGQLNSGKKQIEKLEQELKRCKSELERSQQAAQSADVSLNPCNTPQKIFTTPLTPSQYYSGSKYEDLKEKYNKEVEERKRLEAEVKALQAKKASQTLPQATMNHRDIARHQASSSVFSWQQEKTPSHLSSNSQRTPIRRDFSASYFSGEQEVTPSRSTLQIGKRDANSSFFDNSSSPHLLDQLKAQNQELRNKINELELRLQGHEKEMKGQVNKFQELQLQLEKAKVELIEKEKVLNKCRDELVRTTAQYDQASTKYTALEQKLKKLTEDLSCQRQNAESARCSLEQKIKEKEKEFQEELSRQQRSFQTLDQECIQMKARLTQELQQAKNMHNVLQAELDKLTSVKQQLENNLEEFKQKLCRAEQAFQASQIKENELRRSMEEMKKENNLLKSHSEQKAREVCHLEAELKNIKQCLNQSQNFAEEMKAKNTSQETMLRDLQEKINQQENSLTLEKLKLAVADLEKQRDCSQDLLKKREHHIEQLNDKLSKTEKESKALLSALELKKKEYEELKEEKTLFSCWKSENEKLLTQMESEKENLQSKINHLETCLKTQQIKSHEYNERVRTLEMDRENLSVEIRNLHNVLDSKSVEVETQKLAYMELQQKAEFSDQKHQKEIENMCLKTSQLTGQVEDLEHKLQLLSNEIMDKDRCYQDLHAEYESLRDLLKSKDASLVTNEDHQRSLLAFDQQPAMHHSFANIIGEQGSMPSERSECRLEADQSPKNSAILQNRVDSLEFSLESQKQMNSDLQKQCEELVQIKGEIEENLMKAEQMHQSFVAETSQRISKLQEDTSAHQNVVAETLSALENKEKELQLLNDKVETEQAEIQELKKSNHLLEDSLKELQLLSETLSLEKKEMSSIISLNKREIEELTQENGTLKEINASLNQEKMNLIQKSESFANYIDEREKSISELSDQYKQEKLILLQRCEETGNAYEDLSQKYKAAQEKNSKLECLLNECTSLCENRKNELEQLKEAFAKEHQEFLTKLAFAEERNQNLMLELETVQQALRSEMTDNQNNSKSEAGGLKQEIMTLKEEQNKMQKEVNDLLQENEQLMKVMKTKHECQNLESEPIRNSVKERESERNQCNFKPQMDLEVKEISLDSYNAQLVQLEAMLRNKELKLQESEKEKECLQHELQTIRGDLETSNLQDMQSQEISGLKDCEIDAEEKYISGPHELSTSQNDNAHLQCSLQTTMNKLNELEKICEILQAEKYELVTELNDSRSECITATRKMAEEVGKLLNEVKILNDDSGLLHGELVEDIPGGEFGEQPNEQHPVSLAPLDESNSYEHLTLSDKEVQMHFAELQEKFLSLQSEHKILHDQHCQMSSKMSELQTYVDSLKAENLVLSTNLRNFQGDLVKEMQLGLEEGLVPSLSSSCVPDSSSLSSLGDSSFYRALLEQTGDMSLLSNLEGAVSANQCSVDEVFCSSLQEENLTRKETPSAPAKGVEELESLCEVYRQSLEKLEEKMESQGIMKNKEIQELEQLLSSERQELDCLRKQYLSENEQWQQKLTSVTLEMESKLAAEKKQTEQLSLELEVARLQLQGLDLSSRSLLGIDTEDAIQGRNESCDISKEHTSETTERTPKHDVHQICDKDAQQDLNLDIEKITETGAVKPTGECSGEQSPDTNYEPPGEDKTQGSSECISELSFSGPNALVPMDFLGNQEDIHNLQLRVKETSNENLRLLHVIEDRDRKVESLLNEMKELDSKLHLQEVQLMTKIEACIELEKIVGELKKENSDLSEKLEYFSCDHQELLQRVETSEGLNSDLEMHADKSSREDIGDNVAKVNDSWKERFLDVENELSRIRSEKASIEHEALYLEADLEVVQTEKLCLEKDNENKQKVIVCLEEELSVVTSERNQLRGELDTMSKKTTALDQLSEKMKEKTQELESHQSECLHCIQVAEAEVKEKTELLQTLSSDVSELLKDKTHLQEKLQSLEKDSQALSLTKCELENQIAQLNKEKELLVKESESLQARLSESDYEKLNVSKALEAALVEKGEFALRLSSTQEEVHQLRRGIEKLRVRIEADEKKQLHIAEKLKERERENDSLKDKVENLERELQMSEENQELVILDAENSKAEVETLKTQIEEMARSLKVFELDLVTLRSEKENLTKQIQEKQGQLSELDKLLSSFKSLLEEKEQAEIQIKEESKTAVEMLQNQLKELNEAVAALCGDQEIMKATEQSLDPPIEEEHQLRNSIEKLRARLEADEKKQLCVLQQLKESEHHADLLKGRVENLERELEIARTNQEHAALEAENSKGEVETLKAKIEGMTQSLRGLELDVVTIRSEKENLTNELQKEQERISELEIINSSFENILQEKEQEKVQMKEKSSTAMEMLQTQLKELNERVAALHNDQEACKAKEQNLSSQVECLELEKAQLLQGLDEAKNNYIVLQSSVNGLIQEVEDGKQKLEKKDEEISRLKNQIQDQEQLVSKLSQVEGEHQLWKEQNLELRNLTVELEQKIQVLQSKNASLQDTLEVLQSSYKNLENELELTKMDKMSFVEKVNKMTAKETELQREMHEMAQKTAELQEELSGEKNRLAGELQLLLEEIKSSKDQLKELTLENSELKKSLDCMHKDQVEKEGKVREEIAEYQLRLHEAEKKHQALLLDTNKQYEVEIQTYREKLTSKEECLSSQKLEIDLLKSSKEELNNSLKATTQILEELKKTKMDNLKYVNQLKKENERAQGKMKLLIKSCKQLEEEKEILQKELSQLQAAQEKQKTGTVMDTKVDELTTEIKELKETLEEKTKEADEYLDKYCSLLISHEKLEKAKEMLETQVAHLCSQQSKQDSRGSPLLGPVVPGPSPIPSVTEKRLSSGQNKASGKRQRSSGIWENGRGPTPATPESFSKKSKKAVMSGIHPAEDTEGTEFEPEGLPEVVKKGFADIPTGKTSPYILRRTTMATRTSPRLAAQKLALSPLSLGKENLAESSKPTAGGSRSQKVKVAQRSPVDSGTILREPTTKSVPVNNLPERSPTDSPREGLRVKRGRLVPSPKAGLESNGSENCKVQ

SEQ ID NO: 202 - protein, 2644 aa, Homo sapiens
MGEHGLELASMIPALRELGSATPEEYNTVVQKPRQILCQFIDRILTDVNVVAVELVKKTDSQPTSVMLLDFIQHIMKSSPLMFVNVSGSHEAKGSCIEFSNWIITRLLRIAATPSCHLLHKKICEVICSLLFLFKSKSPAIFGVLTKELLQLFEDLVYLHRRNVMGHAVEWPVVMSRFLSQLDEHMGYLQSAPLQLMSMQNLEFIEVTLLMVLTRIIAIVFFRRQELLLWQIGCVLLEYGSPKIKSLAISFLTELFQLGGLPAQPASTFFSSFLELLKHLVEMDTDQLKLYEEPLSKLIKTLFPFEAEAYRNIEPVYLNMLLEKLCVMFEDGVLMRLKSDLLKAALCHLLQYFLKFVPAGYESALQVRKVYVRNICKALLDVLGIEVDAEYLLGPLYAALKMESMEIIEEIQCQTQQENLSSNSDGISPKRRRLSSSLNPSKRAPKQTEEIKHVDMNQKSILWSALKQKAESLQISLEYSGLKNPVIEMLEGIAVVLQLTALCTVHCSHQNMNCRTFKDCQHKSKKKPSVVITWMSLDFYTKVLKSCRSLLESVQKLDLEATIDKVVKIYDALIYMQVNSSFEDHILEDLCGMLSLPWIYSHSDDGCLKLTTFAANLLTLSCRISDSYSPQAQSRCVFLLTLFPRRIFLEWRTAVYNWALQSSHEVIRASCVSGFFILLQQQNSCNRVPKILIDKVKDDSDIVKKEFASILGQLVCTLHGMFYLTSSLTEPFSEHGHVDLFCRNLKATSQHECSSSQLKASVCKPFLFLLKKKIPSPVKLAFIDNLHHLCKHLDFREDETDVKAVLGTLLNLMEDPDKDVRVAFSGNIKHILESLDSEDGFIKELFVLRMKEAYTHAQISRNNELKDTLILTTGDIGRAAKGDLVPFALLHLLHCLLSKSASVSGAAYTEIRALVAAKSVKLQSFFSQYKKPICQFLVESLHSSQMTALPNTPCQNADVRKQDVAHQREMALNTLSEIANVFDFPDLNRFLTRTLQVLLPDLAAKASPAASALIRTLGKQLNVNRREILINNFKYIFSHLVCSCSKDELERALHYLKNETEIELGSLLRQDFQGLHNELLLRIGEHYQQVFNGLSILASFASSDDPYQGPRDIISPELMADYLQPKLLGILAFFNMQLLSSSVGIEDKKMALNSLMSLMKLMGPKHVSSVRVKMMTTLRTGLRFKDDFPELCCRAWDCFVRCLDHACLGSLLSHVIVALLPLIHIQPKETAAIFHYLIIENRDAVQDFLHEIYFLPDHPELKKIKAVLQEYRKETSESTDLQTTLQLSMKAIQHENVDVRIHALTSLKETLYKNQEKLIKYATDSETVEPIISQLVTVLLKGCQDANSQARLLCGECLGELGAIDPGRLDFSTTETQGKDFTFVTGVEDSSFAYGLLMELTRAYLAYADNSRAQDSAAYAIQELLSIYDCREMETNGPGHQLWRRFPEHVREILEPHLNTRYKSSQKSTDWSGVKKPIYLSKLGSNFAEWSASWAGYLITKVRHDLASKIFTCCSIMMKHDFKVTIYLLPHILVYVLLGCNQEDQQEVYAEIMAVLKHDDQHTINTQDIASDLCQLSTQTVFSMLDHLTQWARHKFQALKAEKCPHSKSNRNKVDSMVSTVDYEDYQSVTRFLDLIPQDTLAVASFRSKAYTRAVMHFESFITEKKQNIQEHLGFLQKLYAAMHEPDGVAGVSAIRKAEPSLKEQILEHESLGLLRDATACYDRAIQLEPDQIIHYHGVVKSMLGLGQLSTVITQVNGVHANRSEWTDELNTYRVEAAWKLSQWDLVENYLAADGKSTTWSVRLGQLLLSAKKRDITAFYDSLKLVRAEQIVPLSAASFERGSYQRGYEYIVRLHMLCELEHSIKPLFQHSPGDSSQEDSLNWVARLEMTQNSYRAKEPILALRRALLSLNKRPDYNEMVGECWLQSARVARKAGHHQTAYNALLNAGESRLAELYVERAKWLWSKGDVHQALIVLQKGVELCFPENETPPEGKNMLIHGRAMLLVGRFMEETANFESNAIMKKYKDVTACLPEWEDGHFYLAKYYDKLMPMVTDNKMEKQGDLIRYIVLHFGRSLQYGNQFIYQSMPRMLTLWLDYGTKAYEWEKAGRSDRVQMRNDLGKINKVITEHTNYLAPYQFLTAFSQLISRICHSHDEVFVVLMEIIAKVFLAYPQQAMWMMTAVSKSSYPMRVNRCKEILNKAIHMKKSLEKFVGDATRLTDKLLELCNKPVDGSSSTLSMSTHFKMLKKLVEEATFSEILIPLQSVMIPTLPSILGTHANHASHEPFPGHWAYIAGFDDMVEILASLQKPKKISLKGSDGKFYIMMCKPKDDLRKDCRLMEFNSLINKCLRKDAESRRRELHIRTYAVIPLNDECGIIEWVNNTAGLRPILTKLYKEKGVYMTGKELRQCMLPKSAALSEKLKVFREFLLPRHPPIFHEWFLRTFPDPTSWYSSRSAYCRSTAVMSMVGYILGLGDRHGENILFDSLTGECVHVDFNCLFNKGETFEVPEIVPFRLTHNMVNGMGPMGTEGLFRRACEVTMRLMRDQREPLMSVLKTFLHDPLVEWSKPVKGHSKAPLNETGEVVNEKAKTHVLDIEQRLQGVIKTRNRVTGLPLSIEGHVHYLIQEATDENLLCQMYLGWTPYM

SEQ ID NO: 203 - protein, 2273 aa, Homo sapiens [sequence omitted]

SEQ ID NO: 204 - protein, 4523 aa, Homo sapiens
MAAQVAAREARDFREAPTLRLTSGAGLEAVGAVELEEEEENEEEAAARRARSFAQDARVRFLGGRLAMMLGFTEEKWSQYLESEDNRQVLGEFLESTSPACLVFSFAASGRLAASQEIPRDANHKLVFISKKITESIGVNDFSQVVLFGELPALSLGHVSAFLDEILVPVLSNKNNHKSWSCFTSQDMEYHIEVMKKKMYIFRGKMSRRTLLPIPTVAGKMDLDQNCSENKPPSNERIILHAIESVVIEWSHQIQEIIERDSVQRLLNGLHLSPQAELDFWMMRRENLSCIYDQLQAPVVLKMVKILTTKQSSYFPTLKDIFLAVENALLEAQDVELYLRPLRRHIQCLQETEFPQTRILIAPLFHTICLIWSHSKFYNTPARVIVLLQEFCNLFINQATAYLSPEDLLRGEIEESLEKVQVAVNILKTFKNSFFNYRKKLASYFMGRKLRPWDFQSHLVFCRFDKFLDRLIKIEDIFATTLEFEKLERLEFGGTKGAILNGQVHEMSEELMELCKLFKQSTYDPSDCTNMEFESDYVAFKSKTLEFDRRLGTIICEAFFNCNGLEAAFKLLTIFGNFLEKPVVMEIFSLHYSTLVHMFNTELDVCKQLYNEHMKQIECGHVVLNKNMPFTSGNMKWAQQVLQRLQMFWSNFASLRYLFLGNPDHALVYQKYVEMTTLLDQFESRIYNEWKSNVDEICEFNLNQPLVKFSAINGLLCVNFDPKLVAVLREVKYLLMLKKQDIPDSALAIFKKRNTILKYIGNLDLLVQGYNKLKQTLLEVEYPLIEDELRAIDEQLTAATTWLTWQDDCWGYIERVRAATSELEHRVERTQKNVKVIQQTMRGWARCVLPPRREHRREAAFTLEDKGDLFTKKYKLIQGDGCKIHNLVEENRKLFKANPSLDTWKIYVEFIDDIVVEGFFQAIMHDLDFFLKNTEKQLKPAPFFQAQMILLPPEIVFKPSLDREAGDGFYDLVEEMLCNSFRMSAQMNRIATHLEIKNYQNDMDNMLGLAEVRQEIMNRVVNVINKVLDFRNTLETHTYLWVDDRAEFMKHFLLYGHAVSSDEMDAHANEEIPEQPPTLEQFKEQIDIYEALYVQMSKFEDFRVFDSWFKVDMKPFKVSLLTIIKKWSWMFQEHLLRFVIDSLNELQEFIKETDSGLQRELNEGDHDGLVDIMVHLLAVRSRQRATDELFEPLKETITLLESYGQKMPEQVYIQLEELPERWETTKKIAATVRHEVSPLHNAEVTLIRKKCILFDAKQAEFRERFRHYAPLGFNAENPYTALDKANEELEALEEEMLQMQESTRLFEVALPEYKQMKQCRKEIKLLKGLWDVIIYVRRSIDNWTKTQWRQIHVEQMDVELRRFAKASSITEIWSLNKEVRVWDAYTGLEGTVKDMTASLRAITELQSPALRDRHWHQLMKAIGVKFLINEATTLADLLALRLHRVEDDVRRIVDKAVKELGTEKVITEISQTWATMKFSYEVHYRTGIPLLKSDEQLFETLEHNQVQLQTLLQSKYVEYFIEQVLSWQNKLNIADLVIFTWMEVQRTWSHLESIFVCSEDIRIQLVKDARRFDGVDAEFKELMFKTAKVENVLEATCRPNLYEKLKDLQSRLSLCEKALAEYLETKRIAFPRFYFVSSADLLDILSKGAQPKQVTCHLAKLFDSIADLQFEDNQDVSAHRAVGMYSKEKEYVPFQAECECVGHVETWLLQLEQTMQETVRHSITEAIVAYEEKPRELWIFDFPAQVALTSSQIWWTTDVGIAFSRLEEGYETALKDFHKKQISQLNTLITLLLGELPPGDRQKIMTICTIDVHARDVVAKLISQKQVVVSPQAFTWLSQLRHRWEDTQKHCFVNICDAQFQYFYEYLGNSPRLVITPLTDRCYITLTQSLHLTMSGAPAGPAGTGKTETTKDLGRALGMMVYVFNCSEQMDYKSIGNIYKGLVQTGAWGCFDEFNRISVEVLSVVAVQVKMIHDAIRNRKKRFVFLGEAITLKPSVGIFITMNPGYAGRTELPENLKALFRPCAMVAPDIELICEILLVAEGFVDARALARKFITLYTLCKELLSKQDHYDWGLRAIKSVLVVAGSLKRGDKNRPEDQVLMRALRDFNMPKIVTDDIPVFLGLVGDLFPALDVPRRRKLHFEQMVRQSTLELRLQPEESFILKVVQLEELLAVRHSVFVVGNAGTGKSKILRTLNRTYVNMKQKPVWNDLNPKAVTTDELFGFIHHATREWKDGKIVYSYFIGLFSSILREQANLKHDGPKWIVLDGDIDPMWIESLNTVMDDNKVLTLASNERIALTPFMRLLFEIHHLRSATPATVSRAGILYVNPQDLGWNPYVASWIDRRRHQSEKANLTILFDKYVPACLDKLRTSFKTITSIPESSLVQTLCVLLECLLTPENVPSDSPKEVYEVYFVFACIWAFGGTLLQDQISDYQADFSRWWQKEMKAVKFPSQGTIFDYYVDHKTKKLLPWADKIAQFTMDPDVPLQTVLVHTTETARLRYFMELLLEKGKPLMLVGNAGVGKTVFVGDTLASLSEDYIVSRVPFNYYTTSTALQKILEKPLEKKAGHNYGPGGNKKLIYFIDDMNMPEVDLYGTVQPHTLIRQHIDYGHWYDRQKVMLKEIHNCQYVACMNPMVGSFTINPRLQRHFTVFAFNFPSLDALNTIYGQIFSFHFQQQAFAPSILRSGPTLIQATIAFHQTMMCNFLPTAIKFHYIFNLRDLSNVFQGILFASPECLKGPLDLIHLWLHESARVYGDKLIDKKDCDLFQRRMLETAYKYFEGIDSHMLLQQPLIYCHFADRGKDPHYMPVKDWEVLKTILTETLDNYNELNAAMHLVLFEDAMQHVCRISRILRTPQGCALLVGVGGSGKQSLSRLAAYLRGLEVFQITLTEGYGIQELRVDLANLYIRTGAKNMPTVFLLTDAQVLDESFLVLINDLLASGEIPDLFSDEDVDKIISGIHNEVHALGMVDSRENCWKFFMARVRLQLKIILCFSPVGRTLRVRARKFPAIVNCTAIDWFHAWPQEALVSVSRRFIEETKGIEPVHKDSISLFMAHVHTTVNEMSTRYYQNERRHNYTTPKSFLEQISLFKNLLKKKQNEVSEKKERLVNGIQKLKTTASQVGDLKARLASQEAELQLRNHDAEALITKIGLQTEKVSREKTIADAEERKVTAIQTEVFQKQRECEADLLKAEPALVAATAALNTLNRVNLSELKAFPNPPIAVTNVTAAVMVLLAPRGRVPKDRSWKAAKVFMGKVDDFLQALINYDKEHIPENCLKVVNEHYLKDPEFNPNLIRTKSFAAAGLCAWVINIIKFYEVYCDVEPKRQALAQANLELAAATEKLEAIRKKLVDLDRNLSRLTASFEKATAEKVRCQEEVNQTNKTIKLANRLVKELEAKKIRWGQSIKSFEAQEKTLCGDVLLTAAFVSYVGPFTRQYRQELVHCKWVPFLQQKVSIPLTEGLDLISMLTDDATIAAWNNEGLPSDRMSTENAAILTHCERWPLVIDPQQQGIKWIKNKYGMDLKVTHLGQKGFLNAIETALAFGDVILIENLEETIDPVLDPLLGRNTIKKGKYIRIGDKECEFNKNFRLILHTKLANPHYKPELQAQTTLLNFTVTEDGLEAQLLAEVVSIERPDLEKLKLVLTKHQNDFKIELKYLEDDLLLRLSAAEGSFLDDTKLVERLEATKTTVAEIEHKVIEAKENERKINEARECYRPVAARASLLYFVINDLQKINPLYQFSLKAFNVLFHRAIEQADKVEDMQGRISILMESITHAVFLYTSQALFEKDKLTFLSQMAFQILLRKKEIDPLELDFLLRFTVEHTHLSPVDFLTSQSWSAIKAIAVMEEFRGIDRDVEGSAKQWRKWVESECPEKEKLPQEWKKKSLIQKLILLRAMRPDRMTYALRNFVEEKLGAKYVERTRLDLVKAFEESSPATPIFFILSPGVDALKDLEILGKRLGFTIDSGKFHNVSLGQGQETVAEVALEKASKGGHWVILQNVHLVAKWLGTLEKLLERFSQGSHRDYRVFMSAESAPTPDEHIIPQGLLENSIKITNEPPTGMLANLHAALYNFDQDTLEICSKEQEFKSILFSLCYFHACVAGRLRFGPQGWSRSYPFNPGDLTICASVLYNYLEANSKVPWEDLRYLFGEIMYGGHITDDWDRKLCRVYLEEFMNPSLTEDELMLAPGFAAPPYLDYAGYHQYIEEMLPPESPALYGLHPNAEIEFLTVTSNTLFRTLLEMQPRNALSGDELGQSTEEKVKNVLDDILEKLPEEFNMAEIMQKNSNRSPYVLVCFQECERMNILIREIRISLEQLDLSLKGELALSPAVEAQQFALSYDTVPDTWSKLAYPSTYGLAQWFNDLLLRCRELDTWTQDLTLPAVVWLSGFFNPQSFLTAIMQTMARKNEWPLDKTRLTADVTKKTKEDYGHPPREGAYLHGLFMEGARWDTQAGTIVEARLKELACPMPVIFAKATPVDRQETKQTYECPVYRTKLRGPSYIWTFRLKSEEKTAKWVLAGVALLLEA

SEQ ID NO: 205 - protein, 3969 aa, Homo sapiens
MAHSCRWRFPARPGTTGGGGGGGRRGLGGAPRQRVPALLLPPGPPVGGGGPGAPPSPPAVAAAAAAAGSSGAGVPGGAAAASAASSSSASSSSSSSSSASSGPALLRVGPGFDAALQVSAAIGTNLRRFRAVFGESGGGGGSGEDEQFLGFGSDEEVRVRSPTRSPSVKTSPRKPRGRPRSGSDRNSAILSDPSVFSPLNKSETKSGDKIKKKDSKSIEKKRGRPPTFPGVKIKITHGKDISELPKGNKEDSLKKIKRTPSATFQQATKIKKLRAGKLSPLKSKFKTGKLQIGRKGVQIVRRRGRPPSTERIKTPSGLLINSELEKPQKVRKDKEGTPPLTKEDKTVVRQSPRRIKPVRIIPSSKRTDATIAKQLLQRAKKGAQKKIEKEAAQLQGRKVKTQVKNIRQFIMPVVSAISSRIIKTPRRFIEDEDYDPPIKIARLESTPNSRFSAPSCGSSEKSSAASQHSSQMSSDSSRSSSPSVDTSTDSQASEEIQVLPEERSDTPEVHPPLPISQSPENESNDRRSRRYSVSERSFGSRTTKKLSTLQSAPQQQTSSSPPPPLLTPPPPLQPASSISDHTPWLMPPTIPLASPFLPASTAPMQGKRKSILREPTFRWTSLKHSRSEPQYFSSAKYAKEGLIRKPIFDNFRPPPLTPEDVGFASGFSASGTAASARLFSPLHSGTRFDMHKRSPLLRAPRFTPSEAHSRIFESVTLPSNRTSAGTSSSGVSNRKRKRKVFSPIRSEPRSPSHSMRTRSGRLSSSELSPLTPPSSVSSSLSISVSPLATSALNPTFTFPSHSLTQSGESAEKNQRPRKQTSAPAEPFSSSSPTPLFPWFTPGSQTERGRNKDKAPEELSKDRDADKSVEKDKSRERDREREKENKRESRKEKRKKGSEIQSSSALYPVGRVSKEKVVGEDVATSSSAKKATGRKKSSSHDSGTDITSVTLGDTTAVKTKILIKKGRGNLEKTNLDLGPTAPSLEKEKTLCLSTPSSSTVKHSTSSIGSMLAQADKLPMTDKRVASLLKKAKAQLCKIEKSKSLKQTDQPKAQGQESDSSETSVRGPRIKHVCRRAAVALGRKRAVFPDDMPTLSALPWEEREKILSSMGNDDKSSIAGSEDAEPLAPPIKPIKPVTRNKAPQEPPVKKGRRSRRCGQCPGCQVPEDCGVCTNCLDKPKFGGRNIKKQCCKMRKCQNLQWMPSKAYLQKQAKAVKKKEKKSKTSEKKDSKESSVVKNVVDSSQKPTPSAREDPAPKKSSSEPPPRKPVEEKSEEGNVSAPGPESKQATTPASRKSSKQVSQPALVIPPQPPTTGPPRKEVPKTTPSEPKKKQPPPPESGPEQSKQKKVAPRPSIPVKQKPKEKEKPPPVNKQENAGTLNILSTLSNGNSSKQKIPADGVHRIRVDFKEDCEAENVWEMGGLGILTSVPITPRVVCFLCASSGHVEFVYCQVCCEPFHKFCLEENERPLEDQLENWCCRRCKFCHVCGRQHQATKQLLECNKCRNSYHPECLGPNYPTKPTKKKKVWICTKCVRCKSCGSTTPGKGWDAQWSHDFSLCHDCAKLFAKGNFCPLCDKCYDDDDYESKMMQCGKCDRWVHSKCENLSDEMYEILSNLPESVAYTCVNCTERHPAEWRLALEKELQISLKQVLTALLNSRTTSHLLRYRQAAKPPDLNPETEESIPSRSSPEGPDPPVLTEVSKQDDQQPLDLEGVKRKMDQGNYTSVLEFSDDIVKIIQAAINSDGGQPEIKKANSMVKSFFIRQMERVFPWFSVKKSRFWEPNKVSSNSGMLPNAVLPPSLDHNYAQWQEREENSHTEQPPLMKKIIPAPKPKGPGEPDSPTPLHPPTPPILSTDRSREDSPELNPPPGIEDNRQCALCLTYGDDSANDAGRLLYIGQNEWTHVNCALWSAEVFEDDDGSLKNVHMAVIRGKQLRCEFCQKPGATVGCCLTSCTSNYHFMCSRAKNCVFLDDKKVYCQRHRDLIKGEVVPENGFEVFRRVFVDFEGISLRRKFLNGLEPENIHMMIGSMTIDCLGILNDLSDCEDKLFPIGYQCSRVYWSTTDARKRCVYTCKIVECRPPVVEPDINSTVEHDENRTIAHSPTSFTESSSKESQNTAEIISPPSPDRPPHSQTSGSCYYHVISKVPRIRTPSYSPTQRSPGCRPLPSAGSPTPTTHEIVTVGDPLLSSGLRSIGSRRHSTSSLSPQRSKLRIMSPMRTGNTYSRNNVSSVSTTGTATDLESSAKVVDHVLGPLNSSTSLGQNTSTSSNLQRTVVTVGNKNSHLDGSSSSEMKQSSASDLVSKSSSLKGEKTKVLSSKSSEGSAHNVAYPGIPKLAPQVHNTTSRELNVSKIGSFAEPSSVSFSSKEALSFPHLHLRGQRNDRDQHTDSTQSANSSPDEDTEVKTLKLSGMSNRSSIINEHMGSSSRDRRQKGKKSCKETFKEKHSSKSFLEPGQVTTGEEGNLKPEFMDEVLTPEYMGQRPCNNVSSDKIGDKGLSMPGVPKAPPMQVEGSAKELQAPRKRTVKVTLTPLKMENESQSKNALKESSPASPLQIESTSPTEPISASENPGDGPVAQPSPNNTSCQDSQSNNYQNLPVQDRNLMLPDGPKPQEDGSFKRRYPRRSARARSNMFFGLTPLYGVRSYGEEDIPFYSSSTGKKRGKRSAEGQVDGADDLSTSDEDDLYYYNFTRTVISSGGEERLASHNLFREEEQCDLPKISQLDGVDDGTESDTSVTATTRKSSQIPKRNGKENGTENLKIDRPEDAGEKEHVTKSSVGHKNEPKMDNCHSVSRVKTQGQDSLEAQLSSLESSRRVHTSTPSDKNLLDTYNTELLKSDSDNNNSDDCGNILPSDIMDFVLKNTPSMQALGESPESSSSELLNLGEGLGLDSNREKDMGLFEVFSQQLPTTEPVDSSVSSSISAEEQFELPLELPSDLSVLTTRSPTVPSQNPSRLAVISDSGEKRVTITEKSVASSESDPALLSPGVDPTPEGHMTPDHFIQGHMDADHISSPPCGSVEQGHGNNQDLTRNSSTPGLQVPVSPTVPIQNQKYVPNSTDSPGPSQISNAAVQTTPPHLKPATEKLIVVNQNMQPLYVLQTLPNGVTQKIQLTSSVSSTPSVMETNTSVLGPMGGGLTLTTGLNPSLPTSQSLFPSASKGLLPMSHHQHLHSFPAATQSSFPPNISNPPSGLLIGVQPPPDPQLLVSESSQRTDLSTTVATPSSGLKKRPISRLQTRKNKKLAPSSTPSNIAPSDVVSNMTLINFTPSQLPNHPSLLDLGSLNTSSHRTVPNIIKRSKSSIMYFEPAPLLPQSVGGTAATAAGTSTISQDTSHLTSGSVSGLASSSSVLNVVSMQTTTTPTSSASVPGHVTLTNPRLLGTPDIGSISNLLIKASQQSLGIQDQPVALPPSSGMFPQLGTSQTPSTAAITAASSICVLPSTQTTGITAASPSGEADEHYQLQHVNQLLASKTGIHSSQRDLDSASGPQVSNFTQTVDAPNSMGLEQNKALSSAVQASPTSPGGSPSSPSSGQRSASPSVPGPTKPKPKTKRFQLPLDKGNGKKHKVSHLRTSSSEAHIPDQETTSLTSGTGTPGAEAEQQDTASVEQSSQKECGQPAGQVAVLPEVQVTQNPANEQESAEPKTVEEEESNFSSPLMLWLQQEQKRKESITEKKPKKGLVFEISSDDGFQICAESIEDAWKSLTDKVQEARSNARLKQLSFAGVNGLRMLGILHDAVVFLIEQLSGAKHCRNYKFRFHKPEEANEPPLNPHGSARAEVHLRKSAFDMFNFLASKHRQPPEYNPNDEEEEEVQLKSARRATSMDLPMPMRFRHLKKTSKEAVGVYRSPIHGRGLFCKRNIDAGEMVIEYAGNVIRSIQTDKREKYYDSKGIGCYMFRIDDSEVVDATMHGNAARFINHSCEPNCYSRVINIDGQKHIVIFAMRKIYRGEELTYDYKFPIEDASNKLPCNCGAKKCRKFLN

SEQ ID NO: 206 - protein, 304 aa, Homo sapiens
MCGPDDRCPARWPGPGRAVKCGKGLAAARPGRVERGGAQRGGAGLELHPLLGGRTWRAARDADGCEALGTVAVPFDDDDKIVGGYTCEENSLPYQVSLNSGSHFCGGSLISEQWVVSAAHCYKTRIQVRLGEHNIKVLEGNEQFINAAKIIRHPKYNRDTLDNDIMLIKLSSPAVINARVSTISLPTAPPAAGTECLISGWGNTLSFGADYPDELKCLDAPVLTQAECKASYPGKITNSMFCVGFLEGGKDSCQRDSGGPVVCNGQLQGVVSWGHGCAWKNRPGVYTKVYNYVDWIKDTIAANS

SEQ ID NO: 207 - protein, 2567 aa, Homo sapiens
MAISSRLALWEQKIREEDKSPPPSSPPPLFSVIPGGFIKQLVRGTEKEAKEARQRKQLAVASPEREIPEISISQPNSKSSSGTRSGSQQISQDDQSSSPGSSDILGKESEGSRSPDPEQMTSINGEKAQELGSSATPTKKTVPFKRGVRRGDVLLMVAKLDPDSAKPEKTHPHDAPPCKTSPPATDTGKEKKGETSRTPCGSQASTEILAPKAEKTRTGGLGDPGQGTVALKKGEEGQSIVGKGLGTPKTTELKEAEPQGKDRQGTRPQAQGPGEGVRPGKAEKEGAEPTNTVEKGNVSKDVGSEGKHVRPQIPGRKWGGFLGRRSKWDGPQNKKDKEGVLLSKAEKTGEPQTQMEKTSQVQGELGDDLRMGEKAGELRSTTGKAGESWDKKEKMGQPQGKSGNAGEARSQTEKGCEAPKEVSTMVESPAAPGKGGWPGSRGQEAEEPCSRAGDGAGALETELEGPSQPALEKDAERPRIRKENQDGPAPQEEGKGGQSRDSDQAPEDRWYEAEKVWLAQKDGFTLATVLKPDEGTADLPAGRVRLWIDADKTITEVDEEHVHRANPPELDQVEDLASLISVNESSVLNTLLQRYKAQLLHTCTGPDLIVLQPRGPSVPSAGKVPKGRRDGLPAHIGSMAQRAYWALLNQRRDQSIVALGWSGAGKTTCCEQVLEHLVGMAGSVDGRVSVEKIRATFTVLRAFGSVSMAHSRSATRFSMVMSLDFNATGRITAAQLQTMLLEKSRVARQPEGESNFLVFSQMLAGLDLDLRTELNLHQMADSSSFGMGVWSKPEDKQKAAAAFAQLQGAMEMLGISESEQRAVWRVLAAIYHLGAAGACKVGRKQFMRFEWANYAAEALGCEYEELNTATFKHHLRQIIQQMTFGPSRWGLEDEETSSGLKMTGVDCVEGMASGLYQELFAAVVSLINRSFSSHHLSMASIMVVDSPGFQNPRHQGKDRAATFEELCHNYAHERLQLLFYQRTFVSTLQRYQEEGVPVQFDLPDPSPGTTVAVVDQNPSQVRLPAGGGAQDARGLFWVLDEEVHVEGSSDSVVLERLCAAFEKKGAGTEGSSALRTCEQPLQCEIFHQLGWDPVRYDLTGWLHRAKPNLSALDAPQVLHQSKREELRSLFQARAKLPPVCRAVAGLEGTSQQALQRSRMVRRTFASSLAAVRRKAPCSQIKLQMDALTSMIKRSRLHFIHCLVPNPVVESRSGQESPPPPQPGRDKPGAGGPLALDIPALRVQLAGFHILEALRLHRTGYADHMGLTRFRRQFQVLDAPLLKKLMSTSEGIDERKAVEELLETLDLEKKAVAVGHSQVFLKAGVISRLEKQREKLVSQSIVLFQAACKGFLSRQEFKKLKIRRLAAQCIQKNVAVFLAVKDWPWWQLLGSLQPLLSATIGTEQLRAKEEELTTLRRKLEKSEKLRNELRQNTDLLESKIADLTSDLADERFKGDVACQVLESERAERLQAFREVQELKSKHEQVQKKLGDVNKQLEEAQQKIQLNDLERNPTGGADEWQMRFDCAQMENEFLRKRLQQCEERLDSELTARKELEQKLGELQSAYDGAKKMAHQLKRKCHHLTCDLEDTCVLLENQQSRNHELEKKQKKFDLQLAQALGESVFEKGLREKVTQENTSVRWELGQLQQQLKQKEQEASQLKQQVEMLQDHKRELLGSPSLGENCVAGLKERLWKLESSALEQQKIQSQQENTIKQLEQLRQRFELEIERMKQMHQKDREDQEEELEDVRQSCQKRLHQLEMQLEQEYEEKQMVLHEKQDLEGLIGTLCDQIGHRDFDVEKRLRRDLRRTHALLSDVQLLLGTMEDGKTSVSKEELEKVHSQLEQSEAKCEEALKTQKVLTADLESMHSELENMTRNKSLVDEQLYRLQFEKADLLKRIDEDQDDLNELMQKHKDLIAQSAADIGQIQELQLQLEEAKKEKHKLQEQLQVAQMRIEYLEQSTVDRAIVSRQEAVICDLENKTEFQKVQIKRFEVLVIRLRDSLIKMGEELSQAATSESQQRESSQYYQRRLEELKADMEELVQREAEASRRCMELEKYVEELAAVRQTLQTDLETSIRRIADLQAALEEVASSDSDTESVQTAVDCGSSGRKEMDNVSILSSQPEGSLQSWLSCTLSLATDTMRTPSRQSATSSRILSPRINEEAGDTERTQSALALSRARSTNVHSKTSGDKPVSPHFVRRQKYCHFGDGEVLAVQRKSTERLEPASSPLASRSTNTSPLSREKLPSPSAALSEFVEGLRRKRAQRGQGSTLGLEDWPTLPIYQTTGASTLRRGRAGSDEGNLSLRVGAKSPLEIEGAAGGLLRSTSLKCISSDGVGGTTLLPEKSKTQFSSCESLLESRPSMGRKLSSPTTPRDMLLSPTLRPRRRCLESSVDDAGCPDLGKEPLVFQNRQFAHLMEEPLGSDPFSWKLPSLDYERKTKVDFDDFLPAIRKPQTPTSLAGSAKGGQDGSQRSSIHFETEEANRSFLSGIKTILKKSPEPKEDPAHLSDSSSSSGSIVSFKSADSIKSRPGIPRLAGDGGERTSPERREPGTGRKDDDVASIMKKYLQK

SEQ ID NO: 208 - protein, 1721 aa, Homo sapiens
MAQFPTPFGGSLDIWAITVEERAKHDQQFHSLKPISGFITGDQARNFFFQSGLPQPVLAQIWALADMNNDGRMDQVEFSIAMKLIKLKLQGYQLPSALPPVMKQQPVAISSAPAFGMGGIASMPPLTAVAPVPMGSIPVVGMSPTLVSSVPTAAVPPLANGAPPVIQPLPAFAHPAATLPKSSSFSRSGPGSQLNTKLQKAQSFDVASVPPVAEWAVPQSSRLKYRQLFNSHDKTMSGHLTGPQARTILMQSSLPQAQLASIWNLSDIDQDGKLTAEEFILAMHLIDVAMSGQPLPPVLPPEYIPPSFRRVRSGSGISVISSTSVDQRLPEEPVLEDEQQQLEKKLPVTFEDKKRENFERGNLELEKRRQALLEQQRKEQERLAQLERAEQERKERERQEQERKRQLELEKQLEKQRELERQREEERRKEIERREAAKRELERQRQLEWERNRRQELLNQRNKEQEDIVVLKAKKKTLEFELEALNDKKHQLEGKLQDIRCRLTTQRQEIESTNKSRELRIAEITHLQQQLQESQQMLGRLIPEKQILNDQLKQVQQNSLHRDSLVTLKRALEAKELARQHLRDQLDEVEKETRSKLQEIDIFNNQLKELREIHNKQQLQKQKSMEAERLKQKEQERKIIELEKQKEEAQRRAQERDKQWLEHVQQEDEHQRPRKLHEEEKLKREESVKKKDGEEKGKQEAQDKLGRLFHQHQEPAKPAVQAPWSTAEKGPLTISAQENVKVVYYRALYPFESRSHDEITIQPGDIVMVKGEWVDESQTGEPGWLGGELKGKTGWFPANYAEKIPENEVPAPVKPVTDSTSAPAPKLALRETPAPLAVTSSEPSTTPNNWADFSSTWPTSTNEKPETDNWDAWAAQPSLTVPSAGQLRQRSAFTPATATGSSPSPVLGQGEKVEGLQAQALYPWRAKKDNHLNFNKNDVITVLEQQDMWWFGEVQGQKGWFPKSYVKLISGPIRKSTSMDSGSSESPASLKRVASPAAKPVVSGEEFIAMYTYESSEQGDLTFQQGDVILVTKKDGDWWTGTVGDKAGVFPSNYVRLKDSEGSGTAGKTGSLGKKPEIAQVIASYTATGPEQLTLAPGQLILIRKKNPGGWWEGELQARGKKRQIGWFPANYVKLLSPGTSKITPTEPPKSTALAAVCQVIGMYDYTAQNDDELAFNKGQIINVLNKEDPDWWKGEVNGQVGLFPSNYVKLTTDMDPSQQWCSDLHLLDMLTPTERKRQGYIHELIVTEENYVNDLQLVTEIFQKPLMESELLTEKEVAMIFVNWKELIMCNIKLLKALRVRKKMSGEKMPVKMIGDILSAQLPHMQPYIRFCSRQLNGAALIQQKTDEAPDFKEFVKRLAMDPRCKGMPLSSFILKPMQRVTRYPLIIKNILENTPENHPDHSHLKHALEKAEELCSQVNEGVREKENSDRLEWIQAHVQCEGLSEQLVFNSVTNCLGPRKFLHSGKLYKAKSNKELYGFLFNDFLLLTQITKPLGSSGTDKVFSPKSNLQYKMYKTPIFLNEVLVKLPTDPSGDEPIFHISHIDRVYTLRAESINERTAWVQKIKAASELYIETEKKKREKAYLVRSQRATGIGRLMVNVVEGIELKPCRSHGKSNPYCEVTMGSQCHITKTIQDTLNPKWNSNCQFFIRDLEQEVLCITVFERDQFSPDDFLGRTEIRVADIKKDQGSKGPVTKCLLLHEVPTGEIVVRLDLQLFDEP

SEQ ID NO: 209 - protein, 2649 aa, Homo sapiens
MHSSSYSYRSSDSVFSNTTSTRTSLDSNENLLLVHCGPTLINSCISFGSESFDGHRLEMLQQIANRVQRDSVICEDKLILAGNALQSDSKRLESGVQFQNEAEIAGYILECENLLRQHVIDVQILIDGKYYQADQLVQRVAKLRDEIMALRNECSSVYSKGRILTTEQTKLMISGITQSLNSGFAQTLHPSLTSGLTQSLTPSLTSSSMTSGLSSGMTSRLTPSVTPAYTPGFPSGLVPNFSSGVEPNSLQTLKLMQIRKPLLKSSLLDQNLTEEEINMKFVQDLLNWVDEMQVQLDRTEWGSDLPSVESHLENHKNVHRAIEEFESSLKEAKISEIQMTAPLKLTYAEKLHRLESQYAKLLNTSRNQERHLDTLHNFVSRATNELIWLNEKEEEEVAYDWSERNTNIARKKDYHAELMRELDQKEENIKSVQEIAEQLLLENHPARLTIEAYRAAMQTQWSWILQLCQCVEQHIKENTAYFEFFNDAKEATDYLRNLKDAIQRKYSCDRSSSIHKLEDLVQESMEEKEELLQYKSTIANLMGKAKTIIQLKPRNSDCPLKTSIPIKAICDYRQIEITIYKDDECVLANNSHRAKWKVISPTGNEAMVPSVCFTVPPPNKEAVDLANRIEQQYQNVLTLWHESHINMKSVVSWHYLINEIDRIRASNVASIKTMLPGEHQQVLSNLQSRFEDFLEDSQESQVFSGSDITQLEKEVNVCKQYYQELLKSAEREEQEESVYNLYISEVRNIRLRLENCEDRLIRQIRTPLERDDLHESVFRITEQEKLKKELERLKDDLGTITNKCEEFFSQAAASSSVPTLRSELNVVLQNMNQVYSMSSTYIDKLKTVNLVLKNTQAAEALVKLYETKLCEEEAVIADKNNIENLISTLKQWRSEVDEKRQVFHALEDELQKAKAISDEMFKTYKERDLDFDWHKEKADQLVERWQNVHVQIDNRLRDLEGIGKSLKYYRDTYHPLDDWIQQVETTQRKIQENQPENSKTLATQLNQQKMLVSEIEMKQSKMDECQKYAEQYSATVKDYELQTMTYRAMVDSQQKSPVKRRRMQSSADLIIQEFMDLRTRYTALVTLMTQYIKFAGDSLKRLEEEEIKRCKETSEHGAYSDLLQRQKATVLENSKLTGKISELERMVAELKKQKSRVEEELPKVREAAENELRKQQRNVEDISLQKIRAESEAKQYRRELETIVREKEAAERELERVRQLTIEAEAKRAAVEENLLNFRNQLEENTFTRRTLEDHLKRKDLSLNDLEQQKNKLMEELRRKRDNEEELLKLIKQMEKDLAFQKQVAEKQLKEKQKIELEARRKITEIQYTCRENALPVCPITQATSCRAVTGLQQEHDKQKAEELKQQVDELTAANRKAEQDMRELTYELNALQLEKTSSEEKARLLKDKLDETNNTLRCLKLELERKDQAEKGYSQQLRELGRQLNQTTGKAEEAMQEASDLKKIKRNYQLELESLNHEKGKLQREVDRITRAHAVAEKNIQHLNSQIHSFRDEKELERLQICQRKSDHLKEQFEKSHEQLLQNIKAEKENNDKIQRLNEELEKSNECAEMLKQKVEELTRQNNETKLMMQRIQAESENIVLEKQTIQQRCEALKIQADGFKDQLRSTNEHLHKQTKTEQDFQRKIKCLEEDLAKSQNLVSEFKQKCDQQNIIIQNTKKEVRNLNAELNASKEEKRRGEQKVQLQQAQVQELNNRLKKVQDELHLKTIEEQMTHRKMVLFQEESGKFKQSAEEFRKKMEKLMESKVITENDISGIRLDFVSLQQENSRAQENAKLCETNIKELERQLQQYREQMQQGQHMEANHYQKCQKLEDELIAQKREVENLKQKMDQQIKEHEHQLVLLQCEIQKKSTAKDCTFKPDFEMTVKECQHSGELSSRNTGHLHPTPRSPLLRWTQEPQPLEEKWQHRVVEQIPKEVQFQPPGAPLEKEKSQQCYSEYFSQTSTELQITFDETNPITRLSEIEKIRDQALNNSRPPVRYQDNACEMELVKVLTPLEIAKNKQYDMHTEVTTLKQEKNPVPSAEEWMLEGCRASGGLKKGDFLKKGLEPETFQNFDGDHACSVRDDEFKFQGLRHTVTARQLVEAKLLDMRTIEQLRLGLKTVEEVQKTLNKFLTKATSIAGLYLESTKEKISFASAAERIIIDKMVALAFLEAQAATGFIIDPISGQTYSVEDAVLKGVVDPEFRIRLLEAEKAAVGYSYSSKTLSVFQAMENRMLDRQKGKHILEAQIASGGVIDPVRGIRVPPEIALQQGLLNNAILQFLHEPSSNTRVFPNPNNKQALYYSELLRMCVFDVESQCFLFPFGERNISNLNVKKTHRISVVDTKTGSELTVYEAFQRNLIEKSIYLELSGQQYQWKEAMFFESYGHSSHMLTDTKTGLHFNINEAIEQGTIDKALVKKYQEGLITLTELADSLLSRLVPKKDLHSPVAGYWLTASGERISVLKASRRNLVDRITALRCLEAQVSTGGIIDPLTGKKYRVAEALHRGLVDEGFAQQLRQCELVITGIGHPITNKMMSVVEAVNANIINKEMGIRCLEFQYLTGGLIEPQVHSRLSIEEALQVGIIDVLIATKLKDQKSYVRNIICPQTKRKLTYKEALEKADFDFHTGLKLLEVSEPLMTGISSLYYSS

SEQ ID NO: 210 - protein, 3661 aa, Homo sapiens
MSRRAPGSRLSSGGGGGGTKYPRSWNDWQPRTDSASADPDNLKYSSSRDRGGSSSYGLQPSNSAVVSRQRHDDTRVHADIQNDEKGGYSVNGGSGENTYGRKSLGQELRVNNVTSPEFTSVQHGSRALATKDMRKSQERSMSYSDESRLSNLLRRITREDDRDRRLATVKQLKEFIQQPENKLVLVKQLDNILAAVHDVLNESSKLLQELRQEGACCLGLLCASLSYEAEKIFKWIFSKFSSSAKDEVKLLYLCATYKALETVGEKKAFSSVMQLVMTSLQSILENVDTPELLCKCVKCILLVARCYPHIFSTNFRDTVDILVGWHIDHTQKPSLTQQVSGWLQSLEPFWVADLAFSTTLLGQFLEDMEAYAEDLSHVASGESVDEDVPPPSVSLPKLAALLRVFSTVVRSIGERFSPIRGPPITEAYVTDVLYRVMRCVTAANQVFFSEAVLTAANECVGVLLGSLDPSMTIHCDMVITYGLDQLENCQTCGTDYIISVLNLLTLIVEQINTKLPSSFVEKLFIPSSKLLFLRYHKEKEVVAVAHAVYQAVLSLKNIPVLETAYKLILGEMTCALNNLLHSLQLPEACSEIKHEAFKNHVFNVDNAKFVVIFDLSALTTIGNAKNSLIGMWALSPTVFALLSKNLMIVHSDLAVHFPAIQYAVLYTLYSHCTRHDHFISSSLSSSSPSLFDGAVISTVTTATKKHFSIILNLLGILLKKDNLNQDTRKLLMTWALEAAVLMKKSETYAPLFSLPSFHKFCKGLLANTLVEDVNICLQACSSLHALSSSLPDDLLQRCVDVCRVQLVHSGTRIRQAFGKLLKSIPLDVVLSNNNHTEIQEISLALRSHMSKAPSNTFHPQDFSDVISFILYGNSHRTGKDNWLERLFYSCQRLDKRDQSTIPRNLLKTDAVLWQWAIWEAAQFTVLSKLRTPLGRAQDTFQTIEGIIRSLAAHTLNPDQDVSQWTTADNDEGHGNNQLRLVLLLQYLENLEKLMYNAYEGCANALTSPPKVIRTFFYTNRQTCQDWLTRIRLSIMRVGLLAGQPAVTVRHGFDLLTEMKTTSLSQGNELEVTIMMVVEALCELHCPEAIQGIAVWSSSIVGKNLLWINSVAQQAEGRFEKASVEYQEHLCAMTGVDCCISSFDKSVLTLANAGRNSASPKHSLNGESRKTVLSKPTDSSPEVINYLGNKACECYISIADWAAVQEWQNAIHDLKKSTSSTSLNLKADFNYIKSLSSFESGKFVECTEQLELLPGENINLLAGGSKEKIDMKKLLPNMLSPDPRELQKSIEVQLLRSSVCLATALNPIEQDQKWQSITENVVKYLKQTSRIAIGPLRLSTLTVSQSLPVLSTLQLYCSSALENTVSNRLSTEDCLIPLFSEALRSCKQHDVRPWMQALRYTMYQNQLLEKIKEQTVPIRSHLMELGLTAAKFARKRGNVSLATRLLAQCSEVQLGKTTTAQDLVQHFKKLSTQGQVDEKWGPELDIEKTKLLYTAGQSTHAMEMLSSCAISFCKSVKAEYAVAKSILTLAKWIQAEWKEISGQLKQVYRAQHQQNFTGLSTLSKNILTLIELPSVNTMEEEYPRIESESTVHIGVGEPDFILGQLYHLSSVQAPEVAKSWAALASWAYRWGRKVVDNASQGEGVRLLPREKSEVQNLLPDTITEEEKERIYGILGQAVCRPAGIQDEDITLQITESEDNEEDDMVDVIWRQLISSCPWLSELDESATEGVIKVWRKVVDRIFSLYKLSCSAYFTFLKLNAGQIPLDEDDPRLHLSHRVEQSTDDMIVMATLRLLRLLVKHAGELRQYLEHGLETTPTAPWRGIIPQLFSRLNHPEVYVRQSICNLLCRVAQDSPHLILYPAIVGTISLSSESQASGNKFSTAIPTLLGNIQGEELLVSECEGGSPPASQDSNKDEPKSGLNEDQAMMQDCYSKIVDKLSSANPTMVLQVQMLVAELRRVTVLWDELWLGVLLQQHMYVLRRIQQLEDEVKRVQNNNTLRKEEKIAIMREKHTALMKPIVFALEHVRSITAAPAETPHEKWFQDNYGDAIENALEKLKTPLNPAKPGSSWIPFKEIMLSLQQRAQKRASYILRLEEISPWLAAMTNTEIALPGEVSARDTVTIHSVGGTITILPTKTKPKKLLFLGSDGKSYPYLFKGLEDLHLDERIMQFLSIVNTMFATINRQETPRFHARHYSVTPLGTRSGLIQWVDGATPLFGLYKRWQQREAALQAQKAQDSYQTPQNPGIVPRPSELYYSKIGPALKTVGLSLDVSRRDWPLHVMKAVLEELMEATPPNLLAKELWSSCTTPDEWWRVTQSYARSTAVMSMVGYIIGLGDRHLDNVLIDMTTGEVVHIDYNVCFEKGKSLRVPEKVPFRMTQNIETALGVTGVEGVFRLSCEQVLHIMRRGRETLLTLLEAFVYDPLVDWTAGGEAGFAGAVYGGGGQQAESKQSKREMEREITRSLFSSRVAEIKVNWFKNRDEMLVVLPKLDGSLDEYLSLQEQLTDVEKLQGKLLEEIEFLEGAEGVDHPSHTLQHRYSEHTQLQTQQRAVQEAIQVKLNEFEQWITHYQAAFNNLEATQLASLLQEISTQMDLGPPSYVPATAFLQNAGQAHLISQCEQLEGEVGALLQQRRSVLRGCLEQLHHYATVALQYPKAIFQKHRIEQWKTWMEELICNTTVERCQELYRKYEMQYAPQPPPTVCQFITATEMTLQRYAADINSRLIRQVERLKQEAVTVPVCEDQLKEIERCIKVFLHENGEEGSLSLASVIISALCTLTRRNLMMEGAASSAGEQLVDLTSRDGAWFLEELCSMSGNVTCLVQLLKQCHLVPQDLDIPNPMEASETVHLANGVYTSLQELNSNFRQIIFPEALRCLMKGEYTLESMLHELDGLIEQTTDGVPLQTLVESLQAYLRNAAMGLEEETHAHYIDVARLLHAQYGELIQPRNGSVDETPKMSAGQMLLVAFDGMFAQVETAFSLLVEKLNKMEIPIAWRKIDIIREARSTQVNFFDDDNHRQVLEEIFFLKRLQTIKEFFRLCGTFSKTLSGSSSLEDQNTVNGPVQIVNVKTLFRNSCFSEDQMAKPIKAFTADFVRQLLIGLPNQALGLTLCSFISALGVDIIAQVEAKDFGAESKVSVDDLCKKAVEHNIQIGKFSQLVMNRATVLASSYDTAWKKHDLVRRLETSISSCKTSLQRVQLHIAMFQWQHEDLLINRPQAMSVTPPPRSAILTSMKKKLHTLSQIETSIATVQEKLAALESSIEQRLKWAGGANPALAPVLQDFEATIAERRNLVLKESQRASQVTFLCSNIIHFESLRTRTAEALNLDAALFELIKRCQQMCSFASQFNSSVSELELRLLQRVDTGLEHPIGSSEWLLSAHKQLTQDMSTQRAIQTEKEQQIETVCETIQNLVDNIKTVLTGHNRQLGDVKHLLKAMAKDEEAALADGEDVPYENSVRQFLGEYKSWQDNIQTVLFTLVQAMGQVRSQEHVEMLQEITPTLKELKTQSQSIYNNLVSFASPLVTDATNECSSPTSSATYQPSFAAAVRSNTGQKTQPDVMSQNARKLIQKNLATSADTPPSTVPGTGKSVACSPKKAVRDPKTGKAVQERNSYAVSVWKRVKAKLEGRDVDPNRRMSVAEQVDYVIKEATNLDNLAQLYEGWTAWV

SEQ ID NO: 211 - protein, 3135 aa, Homo sapiens
MVFESVVVDVLNRFLGDYVVDLDTSQLSLGIWKGAVALKNLQIKENALSQLDVPFKVKVGHIGNLKLIIPWKNLYTQPVEAVLEEIYLLIVPSSRIKYDPLKEEKQLMEAKQQELKRIEEAKQKVVDQEQHLPEKQDTFAEKLVTQIIKNLQVKISSIHIRYEDDITNRDKPLSFGISLQNLSMQTTDQYWVPCLHDETEKLVRKLIRLDNLFAYWNVKSQMFYLSDYDNSLDDLKNGIVNENIVPEGYDFVFRPISANAKLVMNRRSDFDFSAPKINLEIELHNIAIEFNKPQYFSIMELLESVDMMAQNLPYRKFKPDVPLHHHAREWWAYAIHGVLEVNVCPRLWMWSWKHIRKHRQKVKQYKELYKKKLTSKKPPGELLVSLEELEKTLDVFNITIARQTAEVEVKKAGYKIYKEGVKDPEDNKGWFSWLWSWSEQNTNEQQPDVQPETLEEMLTPEEKALLYEAIGYSETAVDPTLLKTFEALKFFVHLKSMSIVLRENHQKPELVDIVIEEFSTLIVQRPGAQAIKFETKIDSFHITGLPDNSEKPRLLSSLDDAMSLFQITFEINPLDETVSQRCIIEAEPLEIIYDARTVNSIVEFFRPPKEVHLAQLTAATLTKLEEFRSKTATGLLYIIETQKVLDLKINLKASYIIVPQDGIFSPTSNLLLLDLGHLKVTSKSRSELPDVKQGEANLKEIMDRAYDSFDIQLTSVQLLYSRVGDNWREARKLSVSTQHILVPMHFNLELSKAMVFMDVRMPKFKIYGKLPLISLRISDKKLQGIMELIESIPKPEPVTEVSAPVKSFQIQTSTSLGTSQISQKIIPLLELPSVSEDDSEEEFFDAPCSPLEEPLQFPTGVKSIRTRKLQKQDCSVNMTTFKIRFEVPKVLIEFYHLVGDCELSVVEILVLGLGAEIEIRTYDLKANAFLKEFCLKCPEYLDENKKPVYLVTTLDNTMEDLLTLEYVKAEKNVPDLKSTYNNVLQLIKVNFSSLDIHLHTEALLNTINYLHNILPQSEEKSAPVSTTETEDKGDVIKKLGLDSEMIMRPSETEINAKLRNIIVLDSDITAIYKKAVYITGKEVFSFKMVSYMDATAGSAYTDMNVVDIQVNLIVGCIEVVFVTKFLYSILAFIDNFQAAKQALAEATVQAAGMAATGVKELAQRSSRMALDINIKAPVVVIPQSPVSENVFVADFGLITMTNTFHMITESQSSPPPVIDLITIKLSEMRLYRSRFINDAYQEVLDLLLPLNLEVVVERNLCWEWYQEVPCFNVNAQLKPMEFILSQEDITTIFKTLHGNIWYEKDGSASPAVTKDQYSATSGVTTNASHHSGGATVVTAAVVEVHSRALLVKTTLNISFKTDDLTMVLYSPGPKQASFTDVRDPSLKLAEFKLENIISTLKMYTDGSTFSSFSLKNCILDDKRPHVKKATPRMIGLTVGFDKKDMMDIKYRKVRDGCVTDAVFQEMYICASVEFLQTVANVFLEAYTTGTAVETSVQTWTAKEEVPTQESVKWEINVIIKNPEIVFVADMTKNDAPALVITTQCEICYKGNLENSTMTAAIKDLQVRACPFLPVKRKGKITTVLQPCDLFYQTTQKGTDPQVIDMSVKSLTLKVSPVIINTMITITSALYTTKETIPEETASSTAHLWEKKDTKTLKMWFLEESNETEKIAPTTELVPKGEMIKMNIDSIFIVLEAGIGHRTVPMLLAKSRFSGEGKNWSSLINLHCQLELEVHYYNEMFGVWEPLLEPLEIDQTEDFRPWNLGIKMKKKAKMAIVESDPEEENYKVPEYKTVISFHSKDQLNITLSKCGLVMLNNLVKAFTEAATGSSADFVKDLAPFMILNSLGLTISVSPSDSFSVLNIPMAKSYVLKNGESLSMDYIRTKDNDHFNAMTSLSSKLFFILLTPVNHSTADKIPLTKVGRRLYTVRHRESGVERSIVCQIDTVEGSKKVTIRSPVQIRNHFSVPLSVYEGDTLLGTASPENEFNIPLGSYRSFIFLKPEDENYQMCEGIDFEEIIKNDGALLKKKCRSKNPSKESFLINIVPEKDNLTSLSVYSEDGWDLPYIMHLWPPILLRNLLPYKIAYYIEGIENSVFTLSEGHSAQICTAQLGKARLHLKLLDYLNHDWKSEYHIKPNQQDISFVSFTCVTEMEKTDLDIAVHMTYNTGQTVVAFHSPYWMVNKTGRMLQYKADGIHRKHPPNYKKPVLFSFQPNHFFNNNKVQLMVTDSELSNQFSIDTVGSHGAVKCKGLKMDYQVGVTIDLSSFNITRIVTFTPFYMIKNKSKYHISVAEEGNDKWLSLDLEQCIPFWPEYASSKLLIQVERSEDPPKRIYFNKQENCILLRLDNELGGIIAEVNLAEHSTVITFLDYHDGAATFLLINHTKNELVQYNQSSLSEIEDSLPPGKAVFYTWADPVGSRRLKWRCRKSHGEVTQKDDMMMPIDLGEKTIYLVSFFEGLQRIILFTEDPRVFKVTYESEKAELAEQEIAVALQDVGISLVNNYTKQEVAYIGITSSDVVWETKPKKKARWKPMSVKHTEKLEREFKEYTESSPSEDKVIQLDTNVPVRLTPTGHNMKILQPHVIALRRNYLPALKVEYNTSAHQSSFRIQIYRIQIQNQIHGAVFPFVFYPVKPPKSVTMDSAPKPFTDVSIVMRSAGHSQISRIKYFKVLIQEMDLRLDLGFIYALTDLMTEAEVTENTEVELFHKDIEAFKEEYKTASLVDQSQVSLYEYFHISPIKLHLSVSLSSGREEAKDSKQNGGLIPVHSLNLLLKSIGATLTDVQDVVFKLAFFELNYQFHTTSDLQSEVIRHYSKQAIKQMYVLILGLDVLGNPFGLIREFSEGVEAFFYEPYQGAIQGPEEFVEGMALGLKALVGGAVGGLAGAASKITGAMAKGVAAMTMDEDYQQKRREAMNKQPAGFREGITRGGKGLVSGFVSGITGIVTKPIKGAQKGGAAGFFKGVGKGLVGAVARPTGGIIDMASSTFQGIKRATETSEVESLRPPRFFNEDGVIRPYRLRDGTGNQMLQVMENGRFAKYKYFTHVMINKTDMLMITRRGVLFVTKGTFGQLTCEWQYSFDEFTKEPFIVHGRRLRIEAKERVKSVFHAREFGKIINFKTPEDARWILTKLQEAREPSPSL

SEQ ID NO: 212 - protein, 1487 aa, Homo sapiens
MIRLGAPQTLVLLTLLVAAVLRCQGQDVQEAGSCVQDGQRYNDKDVWKPEPCRICVCDTGTVLCDDIICEDVKDCLSPEIPFGECCPICPTDLATASGQPGPKGQKGEPGDIKDIVGPKGPPGPQGPAGEQGPRGDRGDKGEKGAPGPRGRDGEPGTPGNPGPPGPPGPPGPPGLGGNFAAQMAGGFDEKAGGAQLGVMQGPMGPMGPRGPPGPAGAPGPQGFQGNPGEPGEPGVSGPMGPRGPPGPPGKPGDDGEAGKPGKAGERGPPGPQGARGFPGTPGLPGVKGHRGYPGLDGAKGEAGAPGVKGESGSPGENGSPGPMGPRGLPGERGRTGPAGAAGARGNDGQPGPAGPPGPVGPAGGPGFPGAPGAKGEAGPTGARGPEGAQGPRGEPGTPGSPGPAGASGNPGTDGIPGAKGSAGAPGIAGAPGFPGPRGPPGPQGATGPLGPKGQTGEPGIAGFKGEQGPKGEPGPAGPQGAPGPAGEEGKRGARGEPGGVGPIGPPGERGAPGNRGFPGQDGLAGPKGAPGERGPSGLAGPKGANGDPGRPGEPGLPGARGLTGRPGDAGPQGKVGPSGAPGEDGRPGPPGPQGARGQPGVMGFPGPKGANGEPGKAGEKGLPGAPGLRGLPGKDGETGAAGPPGPAGPAGERGEQGAPGPSGFQGLPGPPGPPGEGGKPGDQGVPGEAGAPGLVGPRGERGFPGERGSPGAQGLQGPRGLPGTPGTDGPKGASGPAGPPGAQGPPGLQGMPGERGAAGIAGPKGDRGDVGEKGPEGAPGKDGGRGLTGPIGPPGPAGANGEKGEVGPPGPAGSAGARGAPGERGETGPPGPAGFAGPPGADGQPGAKGEQGEAGQKGDAGAPGPQGPSGAPGPQGPTGVTGPKGARGAQGPPGATGFPGAAGRVGPPGSNGNPGPPGPPGPSGKDGPKGARGDSGPPGRAGEPGLQGPAGPPGEKGEPGDDGPSGAEGPPGPQGLAGQRGIVGLPGQRGERGFPGLPGPSGEPGKQGAPGASGDRGPPGPVGPPGLTGPAGEPGREGSPGADGPPGRDGAAGVKGDRGETGAVGAPGAPGPPGSPGPAGPTGKQGDRGEAGAQGPMGPSGPAGARGIQGPQGPRGDKGEAGEPGERGLKGHRGFTGLQGLPGPPGPSGDQGASGPAGPSGPRGPPGPVGPSGKDGANGIPGPIGPPGPRGRSGETGPAGPPGNPGPPGPPGPPGPGIDMSAFAGLGPREKGPDPLQYMRADQAAGGLRQHDAEVDATLKSLNNQIESIRSPEGSRKNPARTCRDLKLCHPEWKSGDYWIDPNQGCTLDAMKVFCNMETGETCVYPNPANVPKKNWWSSKSKEKKHIWFGETINGGFHFSYGDDNLAPNTANVQMTFLRLLSTEGSQNITYHCKNSIAYLDEAAGNLKKALLIQGSNDVEIRAEGNSRFTYTALKDGCTKHTGKWGKTVIEYRSQKTSRLPIIDIAPMDIGGPEQEFGVDIGPVCFL

SEQ ID NO: 213 - protein, 2098 aa, Homo sapiens
MATDDKTSPTLDSANDLPRSPTSPSHLTHFKPLTPDQDEPPFKSAYSSFVNLFRFNKERAEGGQGEQQPLSGSWTSPQLPSRTQSVRSPTPYKKQLNEELQRRSSALDTRRKAEPTFGGHDPRTAVQLRSLSTVLKRLKEIMEGKSQDSDLKQYWMPDSQCKECYDCSEKFTTFRRRHHCRLCGQIFCSRCCNQEIPGKFMGYTGDLRACTYCRKIALSYAHSTDSNSIGEDLNALSDSACSVSVLDPSEPRTPVGSRKASRNIFLEDDLAWQSLIHPDSSNTPLSTRLVSVQEDAGKSPARNRSASITNLSLDRSGSPMVPSYETSVSPQANRTYVRTETTEDERKILLDSVQLKDLWKKICHHSSGMEFQDHRYWLRTHPNCIVGKELVNWLIRNGHIATRAQAIAIGQAMVDGRWLDCVSHHDQLFRDEYALYRPLQSTEFSETPSPDSDSVNSVEGHSEPSWFKDIKFDDSDTEQIAEEGDDNLANSASPSKRTSVSSFQSTVDSDSAASISLNVELDNVNFHIKKPSKYPHVPPHPADQKEYLISDTGGQQLSISDAFIKESLFNRRVEEKSKELPFTPLGWHHNNLELLREENGEKQAMERLLSANHNHMMALLQQLLHSDSLSSSWRDIIVSLVCQVVQTVRPDVKNQDDDMDIRQFVHIKKIPGGKKFDSVVVNGFVCTKNIAHKKMSSCIKNPKILLLKCSIEYLYREETKFTCIDPIVLQEREFLKNYVQRIVDVRPTLVLVEKTVSRIAQDMLLEHGITLVINVKSQVLERISRMTQGDLVMSMDQLLTKPHLGTCHKFYMQIFQLPNEQTKTLMFFEGCPQHLGCTIKLRGGSDYELARVKEILIFMICVAYHSQLEISFLMDEFAMPPTLMQNPSFHSLIEGRGHEGAVQEQYGGGSIPWDPDIPPESLPCDDSSLLELRIVFEKGEQENKNLPQAVASVKHQEHSTTACPAGLPCAFFAPVPESLLPLPVDDQQDALGSEQPETLQQTVVLQDPKSQIRAFRDPLQDDTGLYVTEEVTSSEDKRKTYSLAFKQELKDVILCISPVITFREPFLLTEKGMRCSTRDYFAEQVYWSPLLNKEFKEMENRRKKQLLRDLSGLQGMNGSIQAKSIQVLPSHELVSTRIAEHLGDSQSLGRMLADYRARGGRIQPKNSDPFAHSKDASSTSSGQSGSKNEGDEERGLILSDAVWSTKVDCLNPINHQRLCVLFSSSSAQSSNAPSACVSPWIVTMEFYGKNDLTLGIFLERYCFRPSYQCPSMFCDTPMVHHIRRFVHGQGCVQIILKELDSPVPGYQHTILTYSWCRICKQVTPVVALSNESWSMSFAKYLELRFYGHQYTRRANAEPCGHSIHHDYHQYFSYNQMVASFSYSPIRLLEVCVPLPKIFIKRQAPLKVSLLQDLKDFFQKVSQVYVAIDERLASLKTDTFSKTREEKMEDIFAQKEMEEGEFKNWIEKMQARLMSSSVDTPQQLQSVFESLIAKKQSLCEVLQAWNNRLQDLFQQEKGRKRPSVPPSPGRLRQGEESKISAMDASPRNISPGLQNGEKEDRFLTTLSSQSSTSSTHLQLPTPPEVMSEQSVGGPPELDTASSSEDVFDGHLLGSTDSQVKEKSTMKAIFANLLPGNSYNPIPFPFDPDKHYLMYEHERVPIAVCEKEPSSIIAFALSCKEYRNALEELSKATQWNSAEEGLPTNSTSDSRPKSSSPIRLPEMSGGQTNRTTETEPQPTKKASGMLSFFRGTAGKSPDLSSQKRETLRGADSAYYQVGQTGKEGTENQGVEPQDEVDGGDTQKKQLINPHVELQFSDANAKFYCRLYYAGEFHKMREVILDSSEEDFIRSLSHSSPWQARGGKSGAAFYATEDDRFILKQMPRLEVQSFLDFAPHYFNYITNAVQQKRPTALAKILGVYRIGYKNSQNNTEKKLDLLVMENLFYGRKMAQVFDLKGSLRNRNVKTDTGKESCDVVLLDENLLKMVRDNPLYIRSHSKAVLRTSIHSDSHFLSSHLIIDYSLLVGRDDTSNELVVGIIDYIRTFTWDKKLEMVVKSTGILGGQGKMPTVVSPELYRTRFCEAMDKYFLMVPDHWTGLGLNC

SEQ ID NO: 214 - protein, 4427 aa, Homo sapiens
MSSKAEKKQRLSGRGSSQASWSGRATRAAVATQEQGNAPAVSEPELQAELPKEEPEPRLEGPQAQSEESVEPEADVKPLFLSRAALTGLADAVWTQEHDAILEHFAQDPTESILTIFIDPCFGLKLELGMPVQTQNQLVYFIRQAPVPITWENFEATVQFGTVRGPYIPALLRLLGGVFAPQIFANTGWPESIRNHFASHLHKFLACLTDTRYKLEGHTVLYIPAEAMNMKPEMVIKDKELVQRLETSMIHWTRQIKEMLSAQETVETGENLGPLEEIEFWRNRCMDLSGISKQLVKKGVKHVESILHLAKSSYLAPFMKLAQQIQDGSRQAQSNLTFLSILKEPYQELAFMKPKDISSKLPKLISLIRIIWVNSPHYNTRERLTSLFRKVCDCQYHFARWEDGKQGPLPCFFGAQGPQITRNLLEIEDIFHKNLHTLRAVRGGILDVKNTCWHEDYNKFRAGIKDLEVMTQNLITSAFELVRDVPHGVLLLDTFHRLASREAIKRTYDKKAVDLYMLFNSELALVNRERNKKWPDLEPYVAQYSGKARWVHILRRRIDRVMTCLAGAHFLPRIGTGKESVHTYQQMVQAIDELVRKTFQEWTSSLDKDCIRRLDTPLLRISQEKAGMLDVNFDKSLLILFAEIDYWERLLFETPHYVVNVAERAEDLRILRENLLLVARDYNRIIAMLSPDEQALFKERIRLLDKKIHPGLKKLHWALKGASAFFITECRIHASKVQMIVNEFKASTLTIGWRAQEMSEKLLVRISGKRVYRDLEFEEDQREHRAAVQQKLMNLHQDVVTIMTNSYEVFKNDGPEIQQQWMLYMIRLDRMMEDALRLNVKWSLLELSKAINGDGKTSPNPLFQVLVILKNDLQGSVAQVEFSPTLQTLAGVVNDIGNHLFSTISVFCHLPDILTKRKLHREPIQTVVEQDEDIKKIQTQISSGMTNNASLLQNYLKTWDMYREIWEINKDSFIHRYQRLNPPVSSFVADIARYTEVANNVQKEETVTNIQFVLLDCSHLKFSLVQHCNEWQNKFATLLREMAAGRLLELHTYLKENAEKISRPPQTLEELGVSLQLVDALKHDLANVETQIPPIHEQFAILEKYEVPVEDSVLEMLDSLNGEWVVFQQTLLDSKQMLKKHKEKFKTGLIHSADDFKKKAHTLLEDFEFKGHFTSNVGYMSALDQITQVRAMLMAMREEENSLRANLGIFKIEQPPSKDLQNLEKELDALQQIWEIARDWEENWNEWKTGRFLILQTETMETTAHGLFRRLTKLAKEYKDRNWEIIETTRSKIEQFKRTMPLISDLRNPALRERHWDQVRDEIQREFDQESESFTLEQIVELGMDQHVEKIGEISASATKELAIEVALQNIAKTWDVTQLDIVPYKDKGHHRLRGTEEVFQALEDNQVALSTMKASRFVKAFEKDVDHWERCLSLILEVIEMILTVQRQWMYLENIFLGEDIRKQLPNESTLFDQVNSNWKAIMDRMNKDNNALRSTHHPGLLDTLIEMNTILEDIQKSLDMYLETKRHIFPRFYFLSNDDLLEILGQSRNPEAVQPHLKKCFDNIKLLRIQKVGGPSSKWEAVGMFSGDGEYIDFLHSVFLEGPVESWLGDVEQTMRVTLRDLLRNCHLALRKFLNKRDKWVKEWAGQVVITASQIQWTADVTKCLLTAKERADKKILKVMKKNQVSILNKYSEAIRGNLTKIMRLKIVALVTIEIHARDVLEKLYKSGLMDVNSFDWLSQLRFYWEKDLDDCVIRQTNTQFQYNYEYLGNSGRLVITPLTDRCYMTLTTALHLHRGGSPKGPAGTGKTETVKDLGKALGIYVIVVNCSEGLDYKSMGRMYSGLAQTGAWGCFDEFNRINIEVLSVVAHQILCILSALAAGLTHFHFDGFEINLVWSCGIFITMNPGYAGRTELPENLKSMFRPIAMVVPDSTLIAEIILFGEGFGNCKILAKKVYTLYSLAVQQLSRQDHYDFGLRALTSLLRYAGKKRRLQPDLTDEEVLLLSMRDMNIAKLTSVDAPLFNAIVQDLFPNIELPVIDYGKLRETVEQEIRDMGLQSTPFTLTKVFQLYETKNSRHSTMIVGCTGSGKTASWRILQASLSSLCRAGDPNFNIVREFPLNPKALSLGELYGEYDLSTNEWTDGILSSVMRTACADEKPDEKWILFDGPVDTLWIENMNSVMDDNKVLTLINGERIAMPEQVSLLFEVEDLAMASPATVSRCGMVYTDYADLGWKPYVQSWLEKRPKAEVEPLQRMFEKLINKMLAFKKDNCKELVPLPEYSGITSLCKLYSALATPENGVNPADGENYVTMVEMTFVFSMIWSVCASVDEEGRKRIDSYLREIEGSFPNKDTVYEYFVDPKIRSWTSFEDKLPKSWRYPPNAPFYKIMVPTVDTVRYNYLVSSLVANQNPILLVGPVGTGKTSIAQSVLQSLPSSQWSVLVVNMSAQTTSNNVQSIIESRVEKRTKGVYVPFGGKSMITFMDDLNMPAKDMFGSQPPLELIRLWIDYGFWYDRTKQTIKYIREMFLMAAMGPPGGGRTVISPRLRSRFNIINMTFPTKSQIIRIFGTMINQKLQDFEEEVKPIGNVVTEATLDMYNTVVQRFLPTPTKMHYLFNLRDISKVFQGMLRANKDFHDTKSSITRLWIHECFRVFSDRLVDAADTEAFMGIISDKLGSFFDLTFHHLCPSKRPPIFGDFLKEPKVYEDLTDLTVLKTVMETALNEYNLSPSVVPMQLVLFREAIEHITRIVRVIGQPRGNMLLVGIGGSGRQSLARLASSICDYTTFQIEVTKHYRKQEFRDDIKRLYRQAGVELKTTSFIFVDTQIADESFLEDINNILSSGEVPNLYKPDEFEEIQSHIIDQARVEQVPESSDSLFAYLIERVQNNLHIVLCLSPMGDPFRNWIRQYPALVNCTTINWFSEWPQEALLEVAEKCLIGVDLGTQENIHRKVAQIFVTMHWSVAQYSQKMLLELRRHNYVTPTKYLELLSGYKKLLGEKRQELLAQANKLRTGLFKIDETREKVQVMSLELEDAKKKVAEFQKQCEEYLVIIVQQKREADEQQKAVTANSEKIAVEEIKCQALADNAQKDLEEALPALEEAMRALESLNKKDIGEIKSYGRPPAQVEIVMQAVMILRGNEPTWAEAKRQLGEQNFIKSLINFDKDNISDKVLKKIGAYCAQPDFQPDIIGRVSLAAKSLCMWVRAMELYGRLYRVVEPKRIRMNAALAQLREKQAALAEAQEKLREVAEKLEMLKKQYDEKLAQKEELRKKSEEMELKLERAGMLVSGLAGEKARWEETVQGLEEDLGYLVGDCLLAAAFLSYMGPFLTNYRDEIVNQIWIGKIWELQVPCSPSFAIDNFLCNPTKVRDWNIQGLPSDAFSTENGIIVTRGNRWALMIDPQAQALKWIKNMEGGQGLKIIDLQMSDYLRILEHAIHFGYPVLLQNVQEYLDPTLNPMLNKSVARIGGRLLMRIGDKEVEYNTNFRFYITTKLSNPHYSPETSAKTTIVNFAVKEQGLEAQLLGIVVRKERPELEEQKDSLVINIAAGKRKLKELEDEILRLLNEATGSLLDDVQLVNTLHTSKITATEVTEQLETSETTEINTDLAREAYRPCAQRASILFFVLNDMGCIDPMYQFSLDAYISLFILSIDKSHRSNKLEDRIDYLNDYHTYAVYRYTCRTLFERHKLLFSFHMCAKILETSGKLNMDEYNFFLRGGVVLDREGQMDNPCSSWLADAYWDNITELDKLTNFHGLMNSFEQYPRDWHLWYTNAAPEKAMLPGEWENACNEMQRMLIVRSLRQDRVAFCVTSFIITNLGSRFIEPPVLNMKSVLEDSTPRSPLVFILSPGVDPTSALLQLAEHMGMAQRFHALSLGQGQAPIAARLLREGVTQGHWVFLANCHLSLSWMPNLDKLVEQLQVEDPHPSFRLWLSSIPHPDFPISILQVSIKMTTEPPKGLKANMTRLYQLMSEPQFSRCSKPAKYKKLLFSLCFFHSVLLERKKFLQLGWNIIYGFNDSDFEVSENLLSLYLDEYEETPWDALKYLIAGINYGGHVTDDWDRRLLTTYINDYFCDQSLSTPFHRLSALETYFIPKDGSLASYKEYISLLPGMDPPEAFGQHPNADVASQITEAQTLFDTLLSLQPQITPTRAGGQTREEKVLELAADVKQKIPEMIDYEGTQKLLALDPSPLNVVLLQEIQRYNTLMQTILFSLTDLEKGIQGLIVMSTSLEEIFNCIFDAHVPPLWGKAYPSQKPLAAWTRDLAMRVEQFELWASRARPPVIFWLSGFTFPTGFLTAVLQSSARQNNVSVDSLSWEFIVSTVDDSNLVYPPKDGVWVRGLYLEGAGWDRKNSCLVEAEPMQLVCLMPTIHFRPAESRKKSAKGMYSCPCYYYPNRAGSSDRASFVIGIDLRSGAMTPDHWIKRGTALLMSLDS

SEQ ID NO: 215 - protein, 3460 aa, Homo sapiens
MERSGWARQTFLLALLLGATLRARAAAGYYPRFSPFFFLCTHHGELEGDGEQGEVLISLHIAGNPTYYVPGQEYHVTISTSTFFDGLLVTGLYTSTSVQASQSIGGSSAFGFGIMSDHQFGNQFMCSVVASHVSHLPTTNLSFIWIAPPAGTGCVNFMATATHRGQVIFKDALAQQLCEQGAPTDVTVHPHLAEIHSDSIILRDDFDSYHQLQLNPNIWVECNNCETGEQCGAIMHGNAVTFCEPYGPRELITTGLNTTTASVLQFSIGSGSCRFSYSDPSIIVLYAKNNSADWIQLEKIRAPSNVSTIIHILYLPEDAKGENVQFQWKQENLRVGEVYEACWALDNILIINSAHRQVVLEDSLDPVDTGNWLFFPGATVKHSCQSDGNSIYFHGNEGSEFNFATTRDVDLSTEDIQEQWSEEFESQPTGWDVLGAVIGTECGTIESGLSMVFLKDGERKLCTPSMDTTGYGNLRFYFVMGGICDPGNSHENDIILYAKIEGRKEHITLDTLSYSSYKVPSLVSVVINPELQTPATKFCLRQKNHQGHNRNVWAVDFFHVLPVLPSTMSHMIQFSINLGCGTHQPGNSVSLEFSTNHGRSWSLLHTECLPEICAGPHLPHSTVYSSENYSGWNRITIPLPNAALTRNTRIRWRQTGPILGNMWAIDNVYIGPSCLKFCSGRGQCTRHGCKCDPGFSGPACEMASQTFPMFISESFGSSRLSSYHNFYSIRGAEVSFGCGVLASGKALVFNKDGRRQLITSFLDSSQSRFLQFTLRLGSKSVLSTCRAPDQPGEGVLLHYSYDNGITWKLLEHYSYLSYHEPRIISVELPGDAKQFGIQFRWWQPYHSSQREDVWAIDEIIMTSVLFNSISLDFTNLVEVTQSLGFYLGNVQPYCGHDWTLCFTGDSKLASSMRYVETQSMQIGASYMIQFSLVMGCGQKYTPHMDNQVKLEYSTNHGLTWHLVQEECLPSMPSCQEFTSASIYHASEFTQWRRVIVLLPQKTWSSATRFRWSQSYYTAQDEWALDSIYIGQQCPNMCSGHGSCDHGICRCDQGYQGTECHPEAALPSTIMSDFENQNGWESDWQEVIGGEIVKPEQGCGVISSGSSLYFSKAGKRQLVSWDLDTSWVDFVQFYIQIGGESASCNKPDSREEGVLLQYSNNGGIQWHLLAEMYFSDFSKPRFVYLELPAAAKTPCTRFRWWQPVFSGEDYDQWAVDDIIILSEKQKQIIPVINPTLPQNFYEKPAFDYPMNQMSVWLMLANEGMVKNETFCAATPSAMIFGKSDGDRFAVTRDLTLKPGYVLQFKLNIGCANQFSSTAPVLLQYSHDAGMSWFLVKEGCYPASAGKGCEGNSRELSEPTMYHTGDFEEWTRITIVIPRSLASSKTRFRWIQESSSQKNVPPFGLDGVYISEPCPSYCSGHGDCISGVCFCDLGYTAAQGTCVSNVPNHNEMFDRFEGKLSPLWYKITGAQVGTGCGTLNDGKSLYFNGPGKREARTVPLDTRNIRLVQFYIQIGSKTSGITCIKPRTRNEGLIVQYSNDNGILWHLLRELDFMSFLEPQIISIDLPQDAKTPATAFRWWQPQHGKHSAQWALDDVLIGMNDSSQTGFQDKFDGSIDLQANWYRIQGGQVDIDCLSMDTALIFTENIGKPRYAETWDFHVSASTFLQFEMSMGCSKPFSNSHSVQLQYSLNNGKDWHLVTEECVPPTIGCLHYTESSIYTSERFQNWKRITVYLPLSTISPRTRFRWIQANYTVGADSWAIDNVVLASGCPWMCSGRGICDAGRCVCDRGFGGPYCVPVVPLPSILKDDFNGNLHPDLWPEVYGAERGNLNGETIKSGTSLIFKGEGLRMLISRDLDCTNTMYVQFSLRFIAKSTPERSHSILLQFSISGGITWHLMDEFYFPQTTNILFINVPLPYTAQTNATRFRLWQPYNNGKKEEIWIVDDFIIDGNNVNNPVMLLDTFDFGPREDNWFFYPGGNIGLYCPYSSKGAPEEDSAMVFVSNEVGEHSITTRDLNVNENTIIQFEINVGCSTDSSSADPVRLEFSRDFGATWHLLLPLCYHSSSHVSSLCSTEHHPSSTYYAGTMQGWRREVVHFGKLHLCGSVRFRWYQGFYPAGSQPVTWAIDNVYIGPQCEEMCNGQGSCINGTKCICDPGYSGPTCKISTKNPDFLKDDFEGQLESDRFLLMSGGKPSRKCGILSSGNNLFFNEDGLRMLMTRDLDLSHARFVQFFMRLGCGKGVPDPRSQPVLLQYSLNGGLSWSLLQEFLFSNSSNVGRYIALEIPLKARSGSTRLRWWQPSENGHFYSPWVIDQILIGGNISGNTVLEDDFTTLDSRKWLLHPGGTKMPVCGSTGDALVFIEKASTRYVVSTDVAVNEDSFLQIDFAASCSVTDSCYAIELEYSVDLGLSWHPLVRDCLPTNVECSRYHLQRILVSDTFNKWTRITLPLPPYTRSQATRFRWHQPAPFDKQQTWAIDNVYIGDGCIDMCSGHGRCIQGNCVCDEQWGGLYCDDPETSLPTQLKDNFNRAPSSQNWLTVNGGKLSTVCGAVASGMALHFSGGCSRLLVTVDLNLTNAEFIQFYFMYGCLITPNNRNQGVLLEYSVNGGITWNLLMEIFYDQYSKPGFVNILLPPDAKEIATRFRWWQPRHDGLDQNDWAIDNVLISGSADQRTVMLDTFSSAPVPQHERSPADAGPVGRIAFDMFMEDKTSVNEHWLFHDDCTVERFCDSPDGVMLCGSHDGREVYAVTHDLTPTEGWIMQFKISVGCKVSEKIAQNQIHVQYSTDFGVSWNYLVPQCLPADPKCSGSVSQPSVFFPTKGWKRITYPLPESLVGNPVRFRFYQKYSDMQWAIDNFYLGPGCLDNCRGHGDCLREQCICDPGYSGPNCYLTHTLKTFLKERFDSEEIKPDLWMSLEGGSTCTECGILAEDTALYFGGSTVRQAVTQDLDLRGAKFLQYWGRIGSENNMTSCHRPICRKEGVLLDYSTDGGITWTLLHEMDYQKYISVRHDYILLPEDALTNTTRLRWWQPFVISNGIVVSGVERAQWALDNILIGGAEINPSQLVDTFDDEGTSHEENWSFYPNAVRTAGFCGNPSFHLYWPNKKKDKTHNALSSRELIIQPGYMMQFKIVVGCEATSCGDLHSVMLEYTKDARSDSWQLVQTQCLPSSSNSIGCSPFQFHEATIYNSVNSSSWKRITIQLPDHVSSSATQFRWIQKGEETEKQSWAIDHVYIGEACPKLCSGHGYCTTGAICICDESFQGDDCSVFSHDLPSYIKDNFESARVTEANWETIQGGVIGSGCGQLAPYAHGDSLYFNGCQIRQAATKPLDLTRASKIMFVLQIGSMSQTDSCNSDLSGPHAVDKAVLLQYSVNNGITWHVIAQHQPKDFTQAQRVSYNVPLEARMKGVLLRWWQPRHNGTGHDQWALDHVEVVLVSTRKQNYMMNFSRQHGLRHFYNRRRRSLRRYP

SEQ ID NO: 216 - protein, 3695 aa, Homo sapiens
MAKRLCAGSALCVRGPRGPAPLLLVGLALLGAARAREEAGGGFSLHPPYFNLAEGARIAASATCGEEAPARGSPRPTEDLYCKLVGGPVAGGDPNQTIRGQYCDICTAANSNKAHPASNAIDGTERWWQSPPLSRGLEYNEVNVTLDLGQVFHVAYVLIKFANSPRPDLWVLERSMDFGRTYQPWQFFASSKRDCLERFGPQTLERITRDDAAICTTEYSRIVPLENGEIVVSLVNGRPGAMNFSYSPLLREFTKATNVRLRFLRTNTLLGHLMGKALRDPTVTRRYYYSIKDISIGGRCVCHGHADACDAKDPTDPFRLQCTCQHNTCGGTCDRCCPGFNQQPWKPATANSANECQSCNCYGHATDCYYDPEVDRRRASQSLDGTYQGGGVCIDCQHHTTGVNCERCLPGFYRSPNHPLDSPHVCRRCNCESDFTDGTCEDLTGRCYCRPNFSGERCDVCAEGFTGFPSCYPTPSSSNDTREQVLPAGQIVNCDCSAAGTQGNACRKDPRVGRCLCKPNFQGTHCELCAPGFYGPGCQPCQCSSPGVADDRCDPDTGQCRCRVGFEGATCDRCAPGYFHFPLCQLCGCSPAGTLPEGCDEAGRCLCQPEFAGPHCDRCRPGYHGFPNCQACTCDPRGALDQLCGAGGLCRCRPGYTGTACQECSPGFHGFPSCVPCHCSAEGSLHAACDPRSGQCSCRPRVTGLRCDTCVPGAYNFPYCEAGSCHPAGLAPVDPALPEAQVPCMCRAHVEGPSCDRCKPGFWGLSPSNPEGCTRCSCDLRGTLGGVAECQPGTGQCFCKPHVCGQACASCKDGFFGLDQADYFGCRSCRCDIGGALGQSCEPRTGVCRCRPNTQGPTCSEPARDHYLPDLHHLRLELEEAATPEGHAVRFGFNPLEFENFSWRGYAQMAPVQPRIVARLNLTSPDLFWLVFRYVNRGAMSVSGRVSVREEGRSATCANCTAQSQPVAFPPSTEPAFITVPQRGFGEPFVLNPGTWALRVEAEGVLLDYVVLLPSAYYEAALLQLRVTEACTYRPSAQQSGDNCLLYTHLPLDGFPSAAGLEALCRQDNSLPRPCPTEQLSPSHPPLITCTGSDVDVQLQVAVPQPGRYALVVEYANEDARQEVGVAVHTPQRAPQQGLLSLHPCLYSTLCRGTARDTQDHLAVFHLDSEASVRLTAEQARFFLHGVTLVPIEEFSPEFVEPRVSCISSHGAFGPNSAACLPSRFPKPPQPIILRDCQVIPLPPGLPLTHAQDLTPAMSPAGPRPRPPTAVDPDAEPTLLREPQATVVFTTHVPTLGRYAFLLHGYQPAHPTFPVEVLINAGRVWQGHANASFCPHGYGCRTLVVCEGQALLDVTHSELTVTVRVPKGRWLWLDYVLVVPENVYSFGYLREEPLDKSYDFISHCAAQGYHISPSSSSLFCRNAAASLSLFYNNGARPCGCHEVGATGPTCEPFGGQCPCHAHVIGRDCSRCATGYWGFPNCRPCDCGARLCDELTGQCICPPRTIPPDCLLCQPQTFGCHPLVGCEECNCSGPGIQELTDPTCDTDSGQCKCRPNVTGRRCDTCSPGFHGYPRCRPCDCHEAGTAPGVCDPLTGQCYCKENVQGPKCDQCSLGTFSLDAANPKGCTRCFCFGATERCRSSSYTRQEFVDMEGWVLLSTDRQVVPHERQPGTEMLRADLRHVPEAVPEAFPELYWQAPPSYLGDRVSSYGGTLRYELHSETQRGDVFVPMESRPDVVLQGNQMSITFLEPAYPTPGHVHRGQLQLVEGNFRHTETRNTVSREELMMVLASLEQLQIRALFSQISSAVFLRRVALEVASPAGQGALASNVELCLCPASYRGDSCQECAPGFYRDVKGLFLGRCVPCQCHGHSDRCLPGSGVCVDCQHNTEGAHCERCQAGFVSSRDDPSAPCVSCPCPLSVPSNNFAEGCVLRGGRTQCLCKPGYAGASCERCAPGFFGNPLVLGSSCQPCDCSGNGDPNLLFSDCDPLTGACRGCLRHTTGPRCEICAPGFYGNALLPGNCTRCDCTPCGTEACDPHSGHCLCKAGVTGRRCDRCQEGHFGFDGCGGCRPCACGPAAEGSECHPQSGQCHCRPGTMGPQCRECAPGYWGLPEQGCRRCQCPGGRCDPHTGRCNCPPGLSGERCDTCSQQHQVPVPGGPVGHSIHCEVCDHCVVLLLDDLERAGALLPAIHEQLRGINASSMAWARLHRLNASIADLQSQLRSPLGPRHETAQQLEVLEQQSTSLGQDARRLGGQAVGTRDQASQLLAGTEATLGHAKTLLAAIRAVDRTLSELMSQTGHLGLANASAPSGEQLLRTLAEVERLLWEMRARDLGAPQAAAEAELAAAQRLLARVQEQLSSLWEENQALATQTRDRLAQHEAGLMDLREALNRAVDATREAQELNSRNQERLEEALQRKQELSRDNATLQATLHAARDTLASVFRLLHSLDQAKEELERLAASLDGARTPLLQRMQTFSPAGSKLRLVEAAEAHAQQLGQLALNLSSIILDVNQDRLTQRAIEASNAYSRILQAVQAAEDAAGQALQQADHTWATVVRQGLVDRAQQLLANSTALEEAMLQEQQRLGLVWAALQGARTQLRDVRAKKDQLEAHIQAAQAMLAMDTDETSKKIAHAKAVAAEAQDTATRVQSQLQAMQENVERWQGQYEGLRGQDLGQAVLDAGHSVSTLEKTLPQLLAKLSILENRGVHNASLALSASIGRVRELIAQARGAASKVKVPMKFNGRSGVQLRTPRDLADLAAYTALKFYLQGPEPEPGQGTEDRFVMYMGSRQATGDYMGVSLRDKKVHWVYQLGEAGPAVLSIDEDIGEQFAAVSLDRTLQFGHMSVTVERQMIQETKGDTVAPGAEGLLNLRPDDFVFYVGGYPSTFTPPPLLRFPGYRGCIEMDTLNEEVVSLYNFERTFQLDTAVDRPCARSKSTGDPWLTDGSYLDGTGFARISFDSQISTTKRFEQELRLVSYSGVLFFLKQQSQFLCLAVQEGSLVLLYDFGAGLKKAVPLQPPPPLTSASKAIQVFLLGGSRKRVLVRVERATVYSVEQDNDLELADAYYLGGVPPDQLPPSLRRLFPTGGSVRGCVKGIKALGKYVDLKRLNTTGVSAGCTADLLVGRAMTFHGHGFLRLALSNVAPLTGNVYSGFGFHSAQDSALLYYRASPDGLCQVSLQQGRVSLQLLRTEVKTQAGFADGAPHYVAFYSNATGVWLYVDDQLQQMKPHRGPPPELQPQPEGPPRLLLGGLPESGTIYNFSGCISNVFVQRLLGPQRVFDLQQNLGSVNVSTGCAPALQAQTPGLGPRGLQATARKASRRSRQPARHPACMLPPHLRTTRDSYQFGGSLSSHLEFVGILARHRNWPSLSMHVLPRSSRGLLLFTARLRPGSPSLALFLSNGHFVAQMEGLGTRLRAQSRQRSRPGRWHKVSVRWEKNRILLVTDGARAWSQEGPHRQHQGAEHPQPHTLFVGGLPASSHSSKLPVTVGFSGCVKRLRLHGRPLGAPTRMAGVTPCILGPLEAGLFFPGSGGVITLDLPGATLPDVGLELEVRPLAVTGLIFHLGQARTPPYLQLQVTEKQVLLRADDGAGEFSTSVTRPSVLCDGQWHRLAVMKSGNVLRLEVDAQSNHTVGPLLAAAAGAPAPLYLGGLPEPMAVQPWPPAYCGCMRRLAVNRSPVAMTRSVEVHGAVGASGCPAA

SEQ ID NO: 217 - protein, 1661 aa, Homo sapiens
MEAPAAEPPVRGCGPQPAPAPAPAPERKKSHRAPSPARPKDVAGWSLAKGRRGPGPGSAVACSAAFSSRPDKKGRAVAPGARGAGVRVAGVRTGVRAKGRPRSGAGPRPPPPPPSLTDSSSEVSDCASEEARLLGLELALSSDAESAAGGPAGVRTGQPAQPAPSAQQPPRPPASPDEPSVAASSVGSSRLPLSASLAFSDLTEEMLDCGPSGLVRELEELRSENDYLKDEIEELRAEMLEMRDVYMEEDVYQLQELRQQLDQASKTCRILQYRLRKAERRSLRAAQTGQVDGELIRGLEQDVKVSKDISMRLHKELEVVEKKRARLEEENEELRQRLIETELAKQVLQTELERPREHSLKKRGTRSLGKADKKTLVQEDSADLKCQLHFAKEESALMCKKLTKLAKENDSMKEELLKYRSLYGDLDSALSAEELADAPHSRETELKVHLKLVEEEANLLSRRIVELEVENRGLRAEMDDMKDHGGGCGGPEARLAFSALGGGECGESLAELRRHLQFVEEEAELLRRSSAELEDQNKLLLNELAKFRSEHELDVALSEDSCSVLSEPSQEELAAAKLQIGELSGKVKKLQYENRVLLSNLQRCDLASCQSTRPMLETDAEAGDSAQCVPAPLGETHESHAVRLCRAREAEVLPGLREQAALVSKAIDVLVADANGFTAGLRLCLDNECADFRLHEAPDNSEGPRDTKLIHAILVRLSVLQQELNAFTRKADAVLGCSVKEQQESFSSLPPLGSQGLSKEILLAKDLGSDFQPPDFRDLPEWEPRIREAFRTGDLDSKPDPSRSFRPYRAEDNDSYASEIKELQLVLAEAHDSLRGLQEQLSQERQLRKEEADNFNQKMVQLKEDQQRALLRREFELQSLSLQRRLEQKFWSQEKNMLVQESQQFKHNFLLLFMKLRWFLKRWRQGKVLPSEGDDFLEVNSMKELYLLMEEEEINAQHSDNKACTGDSWTQNTPNEYIKTLADMKVTLKELCWLLRDERRGLTELQQQFAKAKATWETERAELKGHTSQMELKTGKGAGERAGPDWKAALQREREEQQHLLAESYSAVMELTRQLQISERNWSQEKLQLVERLQGEKQQVEQQVKELQNRLSQLQKAADPWVLKHSELEKQDNSWKETRSEKIHDKEAVSEVELGGNGLKRTKSVSSMSEFESLLDCSPYLAGGDARGKKLPNNPAFGFVSSEPGDPEKDTKEKPGLSSRDCNHLGALACQDPPGRQMQRSYTAPDKTGIRVYYSPPVARRLGVPVVHDKEGKIIIEPGFLFTTAKPKESAEADGLAESSYGRWLCNFSRQRLDGGSAGSPSAAGPGFPAALHDFEMSGNMSDDMKEITNCVRQAMRSGSLERKVKSTSSQTVGLASVGTQTIRTVSVGLQTDPPRSSLHGKAWSPRSSSLVSVRSKQISSSLDKVHSRIERPCCSPKYGSPKLQRRSVSKLDSSKDRSLWNLHQGKQNGSAWARSTTTRDSPVLRNINDGLSSLFSVVEHSGSTESVWKLGMSETRAKPEPPKYGIVQEFFRNVCGRAPSPTSSAGEEGTKKPEPLSPASYHQPEGVARILNKKAAKLGSSEEVRLTMLPQVGKDGVLRDGDGAVVLPNEDAVCDCSTQSLTSCFARSSRSAIRHSPSKCRLHPSESSWGGEERALPPSE

SEQ ID NO: 218 - protein, 1464 aa, Homo sapiens
MFSFVDLRLLLLLAATALLTHGQEEGQVEGQDEDIPPITCVQNGLRYHDRDVWKPEPCRICVCDNGKVLCDDVICDETKNCPGAEVPEGECCPVCPDGSESPTDQETTGVEGPKGDTGPRGPRGPAGPPGRDGIPGQPGLPGPPGPPGPPGPPGLGGNFAPQLSYGYDEKSTGGISVPGPMGPSGPRGLPGPPGAPGPQGFQGPPGEPGEPGASGPMGPRGPPGPPGKNGDDGEAGKPGRPGERGPPGPQGARGLPGTAGLPGMKGHRGFSGLDGAKGDAGPAGPKGEPGSPGENGAPGQMGPRGLPGERGRPGAPGPAGARGNDGATGAAGPPGPTGPAGPPGFPGAVGAKGEAGPQGPRGSEGPQGVRGEPGPPGPAGAAGPAGNPGADGQPGAKGANGAPGIAGAPGFPGARGPSGPQGPGGPPGPKGNSGEPGAPGSKGDTGAKGEPGPVGVQGPPGPAGEEGKRGARGEPGPTGLPGPPGERGGPGSRGFPGADGVAGPKGPAGERGSPGPAGPKGSPGEAGRPGEAGLPGAKGLTGSPGSPGPDGKTGPPGPAGQDGRPGPPGPPGARGQAGVMGFPGPKGAAGEPGKAGERGVPGPPGAVGPAGKDGEAGAQGPPGPAGPAGERGEQGPAGSPGFQGLPGPAGPPGEAGKPGEQGVPGDLGAPGPSGARGERGFPGERGVQGPPGPAGPRGANGAPGNDGAKGDAGAPGAPGSQGAPGLQGMPGERGAAGLPGPKGDRGDAGPKGADGSPGKDGVRGLTGPIGPPGPAGAPGDKGESGPSGPAGPTGARGAPGDRGEPGPPGPAGFAGPPGADGQPGAKGEPGDAGAKGDAGPPGPAGPAGPPGPIGNVGAPGAKGARGSAGPPGATGFPGAAGRVGPPGPSGNAGPPGPPGPAGKEGGKGPRGETGPAGRPGEVGPPGPPGPAGEKGSPGADGPAGAPGTPGPQGIAGQRGVVGLPGQRGERGFPGLPGPSGEPGKQGPSGASGERGPPGPMGPPGLAGPPGESGREGAPGAEGSPGRDGSPGAKGDRGETGPAGPPGAPGAPGAPGPVGPAGKSGDRGETGPAGPAGPVGPVGARGPAGPQGPRGDKGETGEQGDRGIKGHRGFSGLQGPPGPPGSPGEQGPSGASGPAGPRGPPGSAGAPGKDGLNGLPGPIGPPGPRGRTGDAGPVGPPGPPGPPGPPGPPSAGFDFSFLPQPPQEKAHDGGRYYRADDANVVRDRDLEVDTTLKSLSQQIENIRSPEGSRKNPARTCRDLKMCHSDWKSGEYWIDPNQGCNLDAIKVFCNMETGETCVYPTQPSVAQKNWYISKNPKDKRHVWFGESMTDGFQFEYGGQGSDPADVAIQLTFLRLMSTEASQNITYHCKNSVAYMDQQTGNLKKALLLQGSNEIEIRAEGNSRFTYSVTVDGCTSHTGAWGKTVIEYKTTKTSRLPIIDVAPLDVGAPDQEFGFDVGPVCFL

SEQ ID NO: 219 - protein, 3549 aa, Homo sapiens
MFPMQKGSLNLLRQKWESCDYQRSECHPRDSHCTIFQPQESKLLAPEGEVVSAPQSLDPTSLPYSTGEEMWSSKPEEKDSVDKSNNTREYGRPEVLKEDSLSSRRRIERFSIALDELRSVFEAPKSGNKPAEYGGKEVEIERSLCSPAFKSHPGSQLEDSVKDSDKKGKETSFDKMSPESGHSRIFEATAGPNKPESGFAEDSAARGEGVSDLHEVVSLKERMARYQAAVSRGDCRSFSANMMEESEMCAVPGGLAKVKKQFEDEITSSRNTFAQYQYQHQNRSEQEAIHSSQVGTSRSSQEMARNEQEGSKVQKIDVHGTEMVSHLEKHTEEVNQASQFHQYVQETVIDTPEDEEIPKVSTKLLKEQFEKSAQEKILYSDKEMTTPAKQIKTESEYEETFKPSSVVSTSSTSCVSTSQRKETSTTRYSDHSVTSSTLAQINATSSGMTEEFPPPPPDVLQTSVDVTAFSQSPELPSPPRRLPVPKDVYSKQRNLYELNRLYKHIHPELRKNLEKDYISEVSEIVSSQMNSGSSVSADVQQARYVFENTNDSSQKDLNSEREYLEWDEILKGEVQSIRWIFENQPLDSINNGSPDEGDISRGIADQEIIAGGDVKYTTWMFETQPIDTLGAYSSDTVENAEKIPELARGDVCTARWMFETRPLDSMNKMHQSQEESAVTISKDITGGDVKTVRYMFETQHLDQLGQLHSVDEVHLLQLRSELKEIKGNVKRSIKCFETQPLYVIRDGSGQMLEIKTVHREDVEKGDVRTARWMFETQPLDTINKDITEIKVVRGISMEENVKGGVSKAKWLFETQPLEKIKESEEVIIEKEKIIGTDVSRKCWMFETQPLDILKEVPDADSLQREEIIGGDVQTTKHLFETLPIEALKDSPDIGKLQKITASEEEKGDVRHQKWIFETQPLEDIRKDKKEYTRTVKLEEVDRGDVKNYTHIFESNNLIKFDASHKIEVEGVTRGAVELNKSLFETTPLYAIQDPLGKYHQVKTVQQEEIVRGDVRSCRWLFETRPIDQFDESIHKFQIIRGISAQEIQTGNVKSAKWLFETQPLDSIKYFSDVEETESKTEQTRDIVKGDVKTCKWLFETQPMESLYEKVSLMTSSEEIHKGDVKTCTWLFETQPLDTIKDDSETAVKLQTVKQEEIQGGDVRTACFLFETENLDSIQGEEVKEIKPVEMDIQAGDVSSMRYKFENQSLDSISSSSEEVLKKIKTLKTEDIQKGNVLNCRWLFENQPIDKIKESQEGDECVKTVTDIQGGDVRKGCFIFETFSLDEIKEESDYISTKKTITEEVIQGDVKSYRMLFETQPLYAIQDREGSYHEVTTVKKEEVIHGDVRGTRWLFETKPLDSINKSETVYVIKSVTQEDIQKGDVSSVRYRFETQPLDQISEESHNIMPSIDHIQGGNVKTSRQFFESENFDKNNYIRTVSVNEIQKGNVKTSTWLFETHTMDELRGEGLEYENIKTVTQEDVQKGDVKQAVWLFENRTFDSIMEAHKGITKMTKEEIPPSDVKTTTWLFETTPLHEFNETRVEKIEIIGKSIKETLEDLYSQKVIQAPGIIIEADEIGDVRMAKYKLMNQASPEIQKEEIIRADLRNIMVNLLSKRDCTEREILISEEEKGNVNLTKTQLLNRSTEFHAEKEEIVKGDVQQAIKNLFSEERSVKKGILIQEDEKGDINMTIYCLLHENDGDTIEREEVIGGDVKRTIHNLLSSTSNNKISERAKIDASERGNVQFFTTCIEAGALDYLKQLHTESNETLTAKKQEGEKEIIGGDVEGTKLLLKKRQSLVERTVSETDIIPGDVHNTVKVFMTEPQSTFGKIPKEEIIKGDLTSTLNSLSQAVNQKTVTKTEEIIKGNMLATLKSLKESSHRWKESKQPDAIPGDIEKAIECLEKATNTKTEILKKELLKDDLETSLRSLKEAQRSFKEVHKEGVIKKDAKAVMAGSSGEQKTDIHQVAVQRNKNSLLQPKPGPFEPAAKWQGGADTLSQTMGKSCHGNLVEERTEVNLPKAPKGTVKIVIDREQNNDALEKSLRRLSNSHHKSNVLESGDKTGVWTDTTGEQHLRDEYMSRQLTSTVSVKNNLTTKESDRAVRELKKDDVFNSIQSAGKTVGKQQTYELRNDHQKMEGFHIKSPKKTKNIKILTDTQSSKPSPTQHPVSMPVGGTYDLSGDFQKQTLLKQETKYSNKDIKKKNINLQPMWQLLPVEQDTSNVTEMKVSEKSHNTFKATNKKRETDVHLKSQDFLMKTNTSTGLKMAMERSLNPINFNPENNVKESECPLPPPSPPPPPPSNASSEIEFPLPPPPPLMMFPEKNGFLPSLSTEKIKAEFESFPGLPLPPPPVDEKSERESSSMFLPPPPPPTPSQKPAHLLSSSAPEKHSGDFMQQYSQKEASNSQNSQAKIITGKTGVLPPPTLPKPKLPKHIKDNKNDFSPKVELATSLSDMECKITTSKDQKKVMVMTSSEHTETKQNVISKSLDERKQLSIDSANCLSHTVPGTSAPRKKQIAPLIKSHSFPESSGQQNPKPYMRKFKTPLMIAEEKYRQQKEEIEKQKQESSYYNIVKTQSQNQHITEVEKEMPLQKTNEEVSLSGIDSECTVVQPSPGSQSNARILGVCSDNQLSTTSPETVAAKRLHHVLAASEDKDKMKKEVLQSSRDIMQSKSACEIKQSHQECSTQQTQQKKYLEQLHLPQSKPISPNFKVKTIKLPTLDHTLNETDHSYESHKQQSEIDVQTFTKKQYLKTKKTEASTECSHKQSLAERHYQLPKKEKRVTVQLPTESIQKNQEDKLKMVPRKQREFSGSDRGKLPGSEEKNQGPSMIGRKEERLITERKHEHLKNKSAPKVVKQKVIDAHLDSQTQNFQQTQIQTAESKAEHKKLPQPYNSLQEEKCLEVKGIQEKQVFSNTKDSKQEITQNKSFFSSVKESQRDDGKGALNIVEFLRKREELQQILSRVKQFEAEPNKSGLKTFQTLLNTIPGWLISEDKREYAVHIAMENNLEKVKEEITHIKTQAEDMLVSYENIIQTAMMSSKTGKPGNKPTSLDETSSKVSNVHVSNNKNSEQKENKIAKEKTVQHQVAAHHEATVRSHVKTHQEIKLDDSNIPPPSLKTRPPSPTFITIESTARRTENPTKNELSQSPKKDSYVEPPPRRPMSQKSEIHRANTSPSPPRSRSEQLVRLKDTTAKLSKGAIPCPAATPVPIVEKRSEIIMSPATLRRQIKIETRGRDSPPTITIPVNINHAASGSFRESVDAQEEIRKVEKRATYVHKDGLNSTDHMVPDTESYDAVEIIRKVAVPPRLSEHTQRYEAANRTVQMAENFVNDPENEINRWFREFEHGPVSEAKSNRRVYAKGETNHNIQQESRTFCKEEFGLTSLGNTSFTDFSCKHPRELREKIPVKQPRICSETRSLSEHFSGMDAFESQIVESKMKTSSSHSSEAGKSGCDFKHAPPTYEDVIAGHILDISDSPKEVRKNFQKTWQESGRVFKGLGYATADASATEMRTTFQEESAFISEAAAPRQGNMYTLSKDSLSNGVPSGRQAEFS

SEQ ID NO: 220 - protein, 2155 aa, Homo sapiens
MNYSSFLRIWVSFIFALVQHQAQPRELMYPFWQNDTKTPKVDDGSSSEIKLAIPVFFFGVPYRTVYVNNNGVVSFNVLVSQFTPESFPLTDGRAFVAPFWADVHNGIRGEIYYRETMEPAILKRATKDIRKYFKDMATFSATWVFIVTWEEVTFYGGSSTTPVNTFQAVLVSDGSYTFTLFNYYEINWTTGTASGGDPLTGLGGVMAQAGFNGGNLTNFFSLPGSRTPEIVNIQETTNVNVPGRWAFKVDGKEIDPANGCTSRGQFLRRGEVFWDDLNCTVKCRCLDFNNEIYCQEASCSPYEVCEPKGKFFYCSAVETSTCVVFGEPHYHTFDGFLFHFQGSCAYLLARQCLQTSSLPFFSVEAKNEHRRGSAVSWVKELSVEVNGYKILIPKGSYGRVKVNDLVTSLPVTLDLGTVKIYQSGISTAVETDFGLLVTFDGQHYASISVPGSYINSTCGLCGNYNKNPLDDFLRPDGRPAMSVLDLGESWRVYHADWKCDSGCVDNCTQCDAATEALYFGSDYCGFLNKTDGPLWECGTVVDPTAFVHSCVYDLCSVRDNGTLLCQAIQAYALVCQALGIPIGDWRTQTGCVSTVQCPSFSHYSVCTSSCPDTCSDLTASRNCATPCTEGCECNQGFVLSTSQCVPLHKCGCDFDGHYYTMGEFFWATANCTVQCLCEEGGDVYCFNKTCGSGEVCAVEDGYQGCFPKRETVCLLSQNQVLHTFDGASYAFPSEFSYTLLKTCPERPEYLEIDINKKKPDAGPAWLRGLRILVADQEVKIGGIGASEVKLNGQEVELPFFHPSGKLEIYRNKNSTTVESKGVVTVQYSDIGLLYIRLSTTYFNCTGGLCGFYNANASDEFCLPNGKCTDNLAVFLESWTTFEEICNGECGDLLKACNNDSELLKFYRSRSRCGIINDPSNSSFLECHGVVNVTAYYRTCLFRLCQSGGNESELCDSVARYASACKNADVEVGPWRTYDFCPLECPENSHFEECITCTETCETLTLGPICVDSCSEGCQCDEGYALLGSQCVTRSECGCNFEGHQLATNETFWVDLDCQIFCYCSGTDNRVHCETIPCKDDEYCMEEGGLYYCQARTDASCIVSGYGHYLTFDGFPFDFQTSCPLILCTTGSRPSSDSFPKFVVTAKNEDRDPSLALWVKQVDVTVFGYSIVIHRAYKHTVLVNSERLYLPLKLGQGKINIFSFGFHVVVETDFGLKVVYDWKTFLSITVPRSMQNSTYGLCGRYNGNPDDDLEMPMGLLASSVNEFGQSWVKRDTFCQVGCGDRCPSCAKVEGFSKVQQLCSLIPNQNAAFSKCHSKVNPTFFYKNCLFDSCIDGGAVQTACSWLQNYASTCQTQGITVTGWRNYTSCTVTCPPNSHYESCVSVCQPRCAAIRLKSDCSHYCVEGCHCDAGYVLNGKSCILPHSCGCYSDGKYYEPKQLFWNSDCTRRCRCFRRNVIQCDPRQCKSDEECALRNGVRGCFSTKTSYCLAAGGGVFRTFDGAFLRFPANCAFVLSTICQKLPDISFQLIINFDKWSAPNLTIISPVYFYINEEQILINDRNTVKVNGTQVNVPFITGLATKIYSSEGFLVIDTSPDIQIYYNGFNVIKISISERLQNKVCGLCGNFNGDLTDDYVTLRGKPVVSSVVLAQSWKTNGMQKRPLAPSCNELQFSQYAAMCDNVHIQKMQGDGYCLKLTDMKGFFQPCYGLLDPLPFYESCYLDGCYSHKKFQLCGSLAAYGEACRSFGILSTEWIEKENCSGVVEDPCVGADCPNRTCELGNGRELCGCIEPPPYGNNSHDIIDAEVTCKAAQMEVSISKCKLFQLGFEREGVRINDRQCTGIEGEDFISFQINNTKGNCGNIVQSNGTHIMYKNTLWIESANNTGNIITRDRTINVEFSCAYELDIKISLDSVVKPMLSVINLTVPTQEGSFITKMALYKNASYKHPYRQGEVVLTTRDVLYVGVFVVGADATHLILTLNKCYATPTRDSNDKLRYFIIEGGCQNLKDNTIGIEENAVSLTCRFHVTVFKFIGDYDEVHLHCAVSLCDSEKYSCKITCPHNSRIATDYTKEPKEQIISVGPIRRKRLDWCEDNGGCEQICTSRVDGPLCSCVTGTLQEDGKSCRASNSSMELQVWTLLLIMIQISLWHFVYKSGTTS

SEQ ID NO: 221 - protein, 3487 aa, Homo sapiens
MRLISIAPGPRWQVQSHHPRSAGQNCTFQLHGPNGTVESPGFPYGYPNYANCTWTITAEEQHRIQLVFQSFALEEDFDVLSVFDGPPQPENLRTRLTGFQLPATIVSAATTLSLRLISDYAVSAQGFHATYEVLPSHTCGNPGRLPNGIQQGSTFNLGDKVRYSCNLGFFLEGHAVLTCHAGSENSATWDFPLPSCRADDACGGTLRGQSGIISSPHFPSEYHNNADCTWTILAELGDTIALVFIDFQLEDGYDFLEVTGTEGSSLWFTGASLPAPVISSKNWLRLHFTSDGNHRQRGFSAQYQVKKQIELKSRGVKLMPSKDNSQKTSVLTQVGVSQGHNMCPDPGIPERGKRLGSDFRLGSSVQFTCNEGYDLQGSKRITCMKVSDMFAAWSDHRPVCRARMCDAHLRGPSGIITSPNFPIQYDNNAHCVWIITALNPSKVIKLAFEEFDLERGYDTLTVGDGGQDGDQKTVLYILTGTSVPDLIVSTNHQMWLLFQTDGSGSSLGFKASYEEIEQGSCGDPGIPAYGRREGSRFHHGDTLKFECQPAFELVGQKAITCQKNNQWSAKKPGCVFSCFFNFTSPSGVVLSPNYPEDYGNHLHCVWLILARPESRIHLAFNDIDVEPQFDFLVIKDGATAEAPVLGTFSGNQLPSSITSSGHVARLEFQTDHSTGKRGFNITFTTFRHNECPDPGVPVNGKRFGDSLQLGSSISFLCDEGFLGTQGSETITCVLKEGSVVWNSAVLRCEAPCGGHLTSPSGTILSPGWPGFYKDALSCAWVIEAQPGYPIKITFDRFKTEVNYDTLEVRDGRTYSAPLIGVYHGTQVPQFLISTSNYLYLLFSTDKSHSDIGFQLRYETITLQSDHCLDPGIPVNGQRHGNDFYVGALVTFSCDSGYTLSDGEPLECEPNFQWSRALPSCEALCGGFIQGSSGTILSPGFPDFYPNNLNCTWIIETSHGKGVFFTFHTFHLESGHDYLLITENGSFTQPLRQLTGSRLPAPISAGLYGNFTAQVRFISDFSMSYEGFNITFSEYDLEPCEEPEVPAYSIRKGLQFGVGDTLTFSCFPGYRLEGTARITCLGGRRRLWSSPLPRCVAECGNSVTGTQGTLLSPNFPVNYNNNHECIYSIQTQPGKGIQLKARAFELSEGDVLKVYDGNNNSARLLGVFSHSEMMGVTLNSTSSSLWLDFITDAENTSKGFELHFSSFELIKCEDPGTPKFGYKVHDEGHFAGSSVSFSCDPGYSLRGSEELLCLSGERRTWDRPLPTCVAECGGTVRGEVSGQVLSPGYPAPYEHNLNCIWTIEAEAGCTIGLHFLVFDTEEVHDVLRIWDGPVESGVLLKELSGPALPKDLHSTFNSVVLQFSTDFFTSKQGFAIQFSVSTATSCNDPGIPQNGSRSGDSWEAGDSTVFQCDPGYALQGSAEISCVKIENRFFWQPSPPTCIAPCGGDLTGPSGVILSPNYPEPYPPGKECDWKVTVSPDYVIALVFNIFNLEPGYDFLHIYDGRDSLSPLIGSFYGSQLPGRIESSSNSLFLAFRSDASVSNAGFVIDYTENPRESCFDPGSIKNGTRVGSDLKLGSSVTYYCHGGYEVEGTSTLSCILGPDGKPVWNNPRPVCTAPCGGQYVGSDGVVLSPNYPQNYTSGQICLYFVTVPKDYVVFGQFAFFHTALNDVVEVHDGHSQHSRLLSSLSGSHTGESLPLATSNQVLIKFSAKGLAPARGFHFVYQAVPRTSATQCSSVPEPRYGKRLGSDFSVGAIVRFECNSGYALQGSPEIECLPVPGALAQWNVSAPTCVVPCGGNLTERRGTILSPGFPEPYLNSLNCVWKIVVPEGAGIQIQVVSFVTEQNWDSLEVFDGADNTVTMLGSFSGTTVPALLNSTSNQLYLHFYSDISVSAAGFHLEYKTVGLSSCPEPAVPSNGVKTGERYLVNDVVSFQCEPGYALQGHAHISCMPGTVRRWNYPPPLCIAQCGGTVEEMEGVILSPGFPGNYPSNMDCSWKIALPVGFGAHIQFLNFSTEPNHDYIEIRNGPYETSRMMGRFSGSELPSSLLSTSHETTVYFHSDHSQNRPGFKLEYQDLTYSHQISSFLRGFDLSELERTNSTPPVAASYVWDLDPGCEAYELQECPDPEPFANGIVRGAGYNVGQSVTFECLPGYQLTGHPVLTCQHGTNRNWDHPLPKCEVPCGGNITSSNGTVYSPGFPSPYSSSQDCVWLITVPIGHGVRLNLSLLQTEPSGDFITIWDGPQQTAPRLGVFTRSMAKKTVQSSSNQVLLKFHRDAATGGIFAIAFSAYPLTKCPPPTILPNAEVVTENEEFNIGDIVRYRCLPGFTLVGNEILTCKLGTYLQFEGPPPICEVHCPTNELLTDSTGVILSQSYPGSYPQFQTCSWLVRVEPDYNISLTVEYFLSEKQYDEFEIFDGPSGQSPLLKALSGNYSAPLIVTSSSNSVYLRWSSDHAYNRKGFKIRYSAPYCSLPRAPLHGFILGQTSTQPGGSIHFGCNAGYRLVGHSMAICTRHPQGYHLWSEAIPLCQALSCGLPEAPKNGMVFGKEYTVGTKAMYSCSEGYHLQAGAEATAECLDTGLWSNRNVPPQCVPVTCPDVSSISVEHGRWRLIFETQYQFQAQLMLICDPGYYYTGQRVIRCQANGKWSLGDSTPTCRIISCGELPIPPNGHRIGTLSVYGATAIFSCNSGYTLVGSRVRECMANGLWSGSEVRCLAGHCGTPEPIVNGHINGENYSYRGSVVYQCNAGFRLIGMSVRICQQDHHWSGKTPFCVLVSCGHPGSPPHSQMSGDSYTVGAVVRYSCIGKRTLVGNSTRMCGLDGHWTGSLPHCSGTSVGVCGDPGIPAHGIRLGDSFDPGTVMRFSCEAGHVLRGSSERTCQANGSWSGSQPECGVISCGNPGTPSNARVVFSDGLVFSSSIVYECREGYYATGLLSRHCSVNGTWTGSDPECLVINCGDPGIPANGLRLGNDFRYNKTVTYQCVPGYMMESHRVSVLSCTKDRTWNGTKPVCKALMCKPPPLIPNGKVVGSDFMWGSSVTYACLEGYQLSLPAVFTCEGNGSWTGELPQCFPVFCGDPGVPSRGRREDRGFSYRSSVSFSCHPPLVLVGSPRRFCQSDGTWSGTQPSCIDPTLTTCADPGVPQFGIQNNSQGYQVGSTVLFRCQKGYLLQGSTTRTCLPNLTWSGTPPDCVPHHCRQPETPTHANVGALDLPSMGYTLIYSCQEGFSLKGGSEHRTCKADGSWTGKPPICLEVRPSGRPINTAREPPLTQALIPGDVFAKNSLWKGAYEYQGKKQPAMLRVTGFQVANSKVNATMIDHSGVELHLAGTYKKEDFHLLLQVYQITGPVEIFMNKFKDDHWALDGHVSSESSGATFIYQGSVKGQGFGQFGFQRLDLRLLESDPESIGRHFASNSSSVAAAILVPFIALIIAGFVLYLYKHRRRPKVPFNGYAGHENTNVRATFENPMYDRNIQPTDIMASEAEFTVSTVCTAV

SEQ ID NO: 222 - protein, 3616 aa, Homo sapiens
METCDSPPISRQENGQSTSKLCGTTQLDNEVPEKVAGMEPDRENSSTDDNLKTDERKSEALLGFSVENAAATQVTSAKEIPCNECATSFPSLQKYMEHHCPNARLPVLKDDNESEISELEDSDVENLTGEIVYQPDGSAYIIEDSKESGQNAQTGANSKLFSTAMFLDSLASAGEKSDQSASAPMSFYPQIINTFHIASSLGKPFTADQAFPNTSALAGVGPVLHSFRVYDLRHKREKDYLTSDGSAKNSCVSKDVPNNVDLSKFDGCVSDGKRKPVLMCFLCKLSFGYIRSFVTHAVHDHRMTLNDEEQKLLSNKCVSAIIQGIGKDKEPLISFLEPKKSTSVYPHFSTTNLIGPDPTFRGLWSAFHVENGDSLPAGFAFLKGSASTSSSAEQPLGITQMPKAEVNLGGLSSLVVNTPITSVSLSHSSSESSKMSESKDQENNCERPKESNVLHPNGECPVKSEPTEPGDEDEEDAYSNELDDEEVLGELTDSIGNKDFPLLNQSISPLSSSVLKFIEKGTSSSSATVSDDTEKKKQTAAVRASGSVASNYGISGKDFADASASKDSATAAHPSEIARGDEDSSATPHQHGFTPSTPGTPGPGGDGSPGSGIECPKCDTVLGSSRSLGGHMTMMHSRNSCKTLKCPKCNWHYKYQQTLEAHMKEKHPEPGGSCVYCKTGQPHPRLARGESYTCGYKPFRCEVCNYSTTTKGNLSIHMQSDKHLNNVQNLQNGNGEQVFGHSAPAPNTSLSGCGTPSPSKPKQKPTWRCEVCDYETNVARNLRIHMTSEKHMHNMMLLQQNMKQIQHNLHLGLAPAEAELYQYYLAQNIGLTGMKLENPADPQLMINPFQLDPATAAALAPGLVNNELPPEIRLASGQLMGDDLSLLTAGELSPYISDPALKLFQCAVCNKFTSDSLEALSVHVSSERSLPEEEWRAVIGDIYQCKLCNYNTQLKANFQLHCKTDKHMQKYQLVAHIKEGGKSNEWRLKCIAIGNPVHLKCNACDYYTNSVDKLRLHTTNHRHEAALKLYKHLQKQEGAVNPESCYYYCAVCDYTTKVKLNLVQHVRSVKHQQTEGLRKLQLHQQGLAPEEDNLSEIFFVKDCPPNELETASLGARTCDDDLTEQQLRSTSEEQSEEAEGAIKPTAVAEDDEKDTSERDNSEGKNSNKDSGIITPEKELKVSVAGGTQPLLLAKEEDVATKRSKPTEDNKFCHEQFYQCPYCNYNSRDQSRIQMHVLSQHSVQPVICCPLCQDVLSNKMHLQLHLTHLHSVSPDCVEKLLMTVPVPDVMMPNSMLLPAAASEKSERDTPAAVTAEGSGKYSGESPMDDKSMAGLEDSKANVEVKNEEQKPTKEPLEVSEWNKNSSKDVKIPDTLQDQLNEQQKRQPLSVSDRHVYKYRCNHCSLAFKTMQKLQIHSQYHAIRAATMCNLCQRSFRTFQALKKHLEAGHPELSEAELQQLYASLPVNGELWAESETMSQDDHGLEQEMEREYEVDHEGKASPVGSDSSSIPDDMGSEPKRTLPFRKGPNFTMEKFLDPSRPYKCTVCKESFTQKNILLVHYNSVSHLHKLKKVLQEASSPVPQETNSNTDNKPYKCSICNVAYSQSSTLEIHMRSVLHQTKARAAKLEPSGHVAGGHSIAANVNSPGQGMLDSMSLAAVNSKDTHLDAKELNKKQTPDLISAQPAHHPPQSPAQIQMQLQHELQQQAAFFQPQFLNPAFLPHFPMTPEALLQFQQPQFLFPFYIPGTEFSLGPDLGLPGSATFGMPGMTGMAGSLLEDLKQQIQTQHHVGQTQLQILQQQAQQYQATQPQLQPQKQQQQPPPPQQQQQQQASKLLKQEQSNIVSADCQIMKDVPSYKEAEDISEKPEKPKQEFISEGEGLKEGKDTKKQKSLEPSIPPPRIASGARGNAAKALLENFGFELVIQYNENRQKVQKKGKSGEGENTDKLECGTCGKLFSNVLILKSHQEHVHGQFFPYAALEKFARQYREAYDKLYPISPSSPETPPPPPPPPPLPPAPPQPSSMGPVKIPNTVSTPLQAPPPTPPPPPPPPPPPPPPPPPPPPSAPPQVQLPVSLDLPLFPSIMMQPVQHPALPPQLALQLPQMDALSADLTQLCQQQLGLDPNFLRHSQFKRPRTRITDDQLKILRAYFDINNSPSEEQIQEMAEKSGLSQKVIKHWFRNTLFKERQRNKDSPYNFSNPPITVLEDIRIDPQPTSLEHYKSDASFSKRSSRTRFTDYQLRVLQDFFDTNAYPKDDEIEQLSTVLNLPTRVIVVWFQNARQKARKSYENQAETKDNEKRELTNERYIRTSNMQYQCKKCNVVFPRIFDLITHQKKQCYKDEDDDAQDESQTEDSMDATDQVVYKHCTVSGQTDAAKNAAAPAASSGSGTSTPLIPSPKPEPEKTSPKPEYPAEKPKQSDPSPPSQGTKPALPLASTSSDPPQASTAQPQPQPQPPKQPQLIGRPPSASQTPVPSSPLQISMTSLQNSLPPQLLQYQCDQCTVAFPTLELWQEHQHMHFLAAQNQFLHSPFLERPMDMPYMIFDPNNPLMTGQLLGSSLTQMPPQASSSHTTAPTTVAASLKRKLDDKEDNNCSEKEGGNSGEDQHRDKRLRTTITPEQLEILYEKYLLDSNPTRKMLDHIAREVGLKKRVVQVWFQNTRARERKGQFRAVGPAQSHKRCPFCRALFKAKSALESHIRSRHWNEGKQAGYSLPPSPLISTEDGGESPQKYIYFDYPSLPLTKIDLSSENELASTVSTPVSKTAELSPKNLLSPSSFKAECSEDVENLNAPPAEAGYDQNKTDFDETSSINTAISDATTGDEGNTEMESTTGSSGDVKPALSPKEPKTLDTLPKPATTPTTEVCDDKFLFSLTSPSIHFNDKDGDHDQSFYITDDPDDNADRSETSSIADPSSPNPFGSSNPFKSKSNDRPGHKRFRTQMSNLQLKVLKACFSDYRTPTMQECEMLGNEIGLPKRVVQVWFQNARAKEKKFKINIGKPFMINQGGTEGTKPECTLCGVKYSARLSIRDHIFSKQHISKVRETVGSQLDREKDYLAPTTVRQLMAQQELDRIKKASDVLGLTVQQPGMMDSSSLHGISLPTAYPGLPGLPPVLLPGMNGPSSLPGFPQNSNTLTPPGAGMLGFPTSATSSPALSLSSAPTKPLLQTPPPPPPPPPPPPSSSLSGQQTEQQNKESEKKQTKPNKVKKIKEEELEATKPEKHPKKEEKISSALSVLGKVVGETHVDPIQLQALQNAIAGDPASFIGGQFLPYFIPGFASYFTPQLPGTVQGGYFPPVCGMESLFPYGPTMPQTLAGLSPGALLQQYQQYQQNLQESLQKQQKQQQEQQQKPVQAKTSKVESDQPQNSNDASETKEDKSTATESTKEEPQLESKSADFSDTYVVPFVKYEFICRKCQMMFTDEDAAVNHQKSFCYFGQPLIDPQETVLRVPVSKYQCLACDVAISGNEALSQHLQSSLHKEKTIKQAMRNAKEHVRLLPHSVCSPNPNTTSTSQSAASSNNTYPHLSCFSMKSWPNILFQASARRAASPPSSPPSLSLPSTVTSSLCSTSGVQTSLPTESCSDESDSELSQKLEDLDNSLEVKAKPASGLDGNFNSIRMDMFSV

SEQ ID NO: 223 - protein, 2541 aa, Homo sapiens
MVALSLKISIGNVVKTMQFEPSTMVYDACRIIRERIPEAPAGPPSDFGLFLSDDDPKKGIWLEAGKALDYYMLRNGDTMEYRKKQRPLKIRMLDGTVKTIMVDDSKTVTDMLMTICARIGITNHDEYSLVRELMEEKKEEITGTLRKDKTLLRDEKKMEKLKQKLHTDDELNWLDHGRTLREQGVEEHETLLLRRKFFYSDQNVDSRDPVQLNLLYVQARDDILNGSHPVSFDKACEFAGFQCQIQFGPHNEQKHKAGFLDLKDFLPKEYVKQKGERKIFQAHKNCGQMSEIEAKVRYVKLARSLKTYGVSFFLVKEKMKGKNKLVPRLLGITKECVMRVDEKTKEVIQEWNLTNIKRWAASPKSFTLDFGDYQDGYYSVQTTEGEQIAQLIAGYIDIILKKKKSKDHFGLEGDEESTMLEDSVSPKKSTVLQQQYNRVGKVEHGSVALPAIMRSGASGPENFQVGSMPPAQQQITSGQMHRGHMPPLTSAQQALTGTINSSMQAVQAAQATLDDFDTLPPLGQDAASKAWRKNKMDESKHEIHSQVDAITAGTASVVNLTAGDPAETDYTAVGCAVTTISSNLTEMSRGVKLLAALLEDEGGSGRPLLQAAKGLAGAVSELLRSAQPASAEPRQNLLQAAGNVGQASGELLQQIGESDTDPHFQDALMQLAKAVASAAAALVLKAKSVAQRTEDSGLQTQVIAAATQCALSTSQLVACTKVVAPTISSPVCQEQLVEAGRLVAKAVEGCVSASQAATEDGQLLRGVGAAATAVTQALNELLQHVKAHATGAGPAGRYDQATDTILTVTENIFSSMGDAGEMVRQARILAQATSDLVNAIKADAEGESDLENSRKLLSAAKILADATAKMVEAAKGAAAHPDSEEQQQRLREAAEGLRMATNAAAQNAIKKKLVQRLEHAAKQAAASATQTIAAAQHAASTPKASAGPQPLLVQSCKAVAEQIPLLVQGVRGSQAQPDSPSAQLALIAASQSFLQPGGKMVAAAKASVPTIQDQASAMQLSQCAKNLGTALAELRTAAQKAQEACGPLEMDSALSVVQNLEKDLQEVKAAARDGKLKPLPGETMEKCTQDLGNSTKAVSSAIAQLLGEVAQGNENYAGIAARDVAGGLRSLAQAARGVAALTSDPAVQAIVLDTASDVLDKASSLIEEAKKAAGHPGDPESQQRLAQVAKAVTQALNRCVSCLPGQRDVDNALRAVGDASKRLLSDSLPPSTGTFQEAQSRLNEAAAGLNQAATELVQASRGTPQDLARASGRFGQDFSTFLEAGVEMAGQAPSQEDRAQVVSNLKGISMSSSKLLLAAKALSTDPAAPNLKSQLAAAARAVTDSINQLITMCTQQAPGQKECDNALRELETVRELLENPVQPINDMSYFGCLDSVMENSKVLGEAMTGISQNAKNGNLPEFGDAISTASKALCGFTEAAAQAAYLVGVSDPNSQAGQQGLVEPTQFARANQAIQMACQSLGEPGCTQAQVLSAATIVAKHTSALCNSCRLASARTTNPTAKRQFVQSAKEVANSTANLVKTIKALDGAFTEENRAQCRAATAPLLEAVDNLSAFASNPEFSSIPAQISPEGRAAMEPIVISAKTMLESAGGLIQTARALAVNPRDPPSWSVLAGHSRTVSDSIKKLITSMRDKAPGQLECETAIAALNSCLRDLDQASLAAVSQQLAPREGISQEALHTQMLTAVQEISHLIEPLANAARAEASQLGHKVSQMAQYFEPLTLAAVGAASKTLSHPQQMALLDQTKTLAESALQLLYTAKEAGGNPKQAAHTQEALEEAVQMMTEAVEDLTTTLNEAASAAGVVGGMVDSITQAINQLDEGPMGEPEGSFVDYQTTMVRTAKAIAVTVQEMVTKSNTSPEELGPLANQLTSDYGRLASEAKPAAVAAENEEIGSHIKHRVQELGHGCAALVTKAGALQCSPSDAYTKKELIECARRVSEKVSHVLAALQAGNRGTQACITAASAVSGIIADLDTTIMFATAGTLNREGTETFADHREGILKTAKVLVEDTKVLVQNAAGSQEKLAQAAQSSVATITRLADVVKLGAASLGAEDPETQVVLINAVKDVAKALGDLISATKAAAGKVGDDPAVWQLKNSAKVMVTNVTSLLKTVKAVEDEATKGTRALEATTEHIRQELAVFCSPEPPAKTSTPEDFIRMTKGITMATAKAVAAGNSCRQEDVIATANLSRRAIADMLRACKEAAYHPEVAPDVRLRALHYGRECANGYLELLDHVLLTLQKPSPELKQQLTGHSKRVAGSVTELIQAAEAMKGTEWVDPEDPTVIAENELLGAAAAIEAAAKKLEQLKPRAKPKEADESLNFEEQILEAAKSIAAATSALVKAASAAQRELVAQGKVGAIPANALDDGQWSQGLISAARMVAAATNNLCEAANAAVQGHASQEKLISSAKQVAASTAQLLVACKVKADQDSEAMKRLQAAGNAVKRASDNLVKAAQKAAAFEEQENETVVVKEKMVGGIAQIIAAQEEMLRKERELEEARKKLAQIRQQQYKFLPSELRDEH

SEQ ID NO: 224 - protein, 3957 aa, Homo sapiens
MMNEDAAQKSDSGEKFNGSSQRRKRPKKSDSNASFLRAARAGNLDKVVEYLKGGIDINTCNQNGLNALHLAAKEGHVGLVQELLGRGSSVDSATKKGNTALHIASLAGQAEVVKVLVKEGANINAQSQNGFTPLYMAAQENHIDVVKYLLENGANQSTATEDGFTPLAVALQQGHNQAVAILLENDTKGKVRLPALHIAARKDDTKSAALLLQNDHNADVQSKMMVNRTTESGFTPLHIAAHYGNVNVATLLLNRGAAVDFTARNGITPLHVASKRGNTNMVKLLLDRGGQIDAKTRDGLTPLHCAARSGHDQVVELLLERGAPLLARTKNGLSPLHMAAQGDHVECVKHLLQHKAPVDDVTLDYLTALHVAAHCGHYRVTKLLLDKRANPNARALNGFTPLHIACKKNRIKVMELLVKYGASIQAITESGLTPIHVAAFMGHLNIVLLLLQNGASPDVTNIRGETALHMAARAGQVEVVRCLLRNGALVDARAREEQTPLHIASRLGKTEIVQLLLQHMAHPDAATTNGYTPLHISAREGQVDVASVLLEAGAAHSLATKKGFTPLHVAAKYGSLDVAKLLLQRRAAADSAGKNGLTPLHVAAHYDNQKVALLLLEKGASPHATAKNGYTPLHIAAKKNQMQIASTLLNYGAETNIVTKQGVTPLHLASQEGHTDMVTLLLDKGANIHMSTKSGLTSLHLAAQEDKVNVADILTKHGADQDAHTKLGYTPLIVACHYGNVKMVNFLLKQGANVNAKTKNGYTPLHQAAQQGHTHIINVLLQHGAKPNATTANGNTALAIAKRLGYISVVDTLKVVTEEVTTTTTTITEKHKLNVPETMTEVLDVSDEEGDDTMTGDGGEYLRPEDLKELGDDSLPSSQFLDGMNYLRYSLEGGRSDSLRSFSSDRSHTLSHASYLRDSAVMDDSVVIPSHQVSTLAKEAERNSYRLSWGTENLDNVALSSSPIHSGFLVSFMVDARGGAMRGCRHNGLRIIIPPRKCTAPTRVTCRLVKRHRLATMPPMVEGEGLASRLIEVGPSGAQFLGKLHLPTAPPPLNEGESLVSRILQLGPPGTKFLGPVIVEIPHFAALRGKERELVVLRSENGDSWKEHFCDYTEDELNEILNGMDEVLDSPEDLEKKRICRIITRDFPQYFAVVSRIKQDSNLIGPEGGVLSSTVVPQVQAVFPEGALTKRIRVGLQAQPMHSELVKKILGNKATFSPIVTLEPRRRKFHKPITMTIPVPKASSDVMLNGFGGDAPTLRLLCSITGGTTPAQWEDITGTTPLTFVNECVSFTTNVSARFWLIDCRQIQESVTFASQVYREIICVPYMAKFVVFAKSHDPIEARLRCFCMTDDKVDKTLEQQENFAEVARSRDVEVLEGKPIYVDCFGNLVPLTKSGQHHIFSFFAFKENRLPLFVKVRDTTQEPCGRLSFMKEPKSTRGLVHQAICNLNITLPIYTKESESDQEQEEEIDMTSEKNDETESTETSVLKSHLVNEVPVLASPDLLSEVSEMKQDLIKMTAILTTDVSDKAGSIKVKELVKAAEEEPGEPFEIVERVKEDLEKVNEILRSGTCTRDESSVQSSRSERGLVEEEWVIVSDEEIEEARQKAPLEITEYPCVEVRIDKEIKGKVEKDSTGLVNYLTDDLNTCVPLPKEQLQTVQDKAGKKCEALAVGRSSEKEGKDIPPDETQSTQKQHKPSLGIKKPVRRKLKEKQKQKEEGLQASAEKAELKKGSSEESLGEDPGLAPEPLPTVKATSPLIEETPIGSIKDKVKALQKRVEDEQKGRSKLPIRVKGKEDVPKKTTHRPHPAASPSLKSERHAPGSPSPKTERHSTLSSSAKTERHPPVSPSSKTEKHSPVSPSAKTERHSPASSSSKTEKHSPVSPSTKTERHSPVSSTKTERHPPVSPSGKTDKRPPVSPSGRTEKHPPVSPGRTEKRLPVSPSGRTDKHQPVSTAGKTEKHLPVSPSGKTEKQPPVSPTSKTERIEETMSVRELMKAFQSGQDPSKHKTGLFEHKSAKQKQPQEKGKVRVEKEKGPILTQREAQKTENQTIKRGQRLPVTGTAESKRGVRVSSIGVKKEDAAGGKEKVLSHKIPEPVQSVPEEESHRESEVPKEKMADEQGDMDLQISPDRKTSTDFSEVIKQELEDNDKYQQFRLSEETEKAQLHLDQVLTSPFNTTFPLDYMKDEFLPALSLQSGALDGSSESLKNEGVAGSPCGSLMEGTPQISSEESYKHEGLAETPETSPESLSFSPKKSEEQTGETKESTKTETTTEIRSEKEHPTTKDITGGSEERGATVTEDSETSTESFQKEATLGSPKDTSPKRQDDCTGSCSVALAKETPTGLTEEAACDEGQRTFGSSAHKTQTDSEVQESTATSDETKALPLPEASVKTDTGTESKPQGVIRSPQGLELALPSRDSEVLSAVADDSLAVSHKDSLEASPVLEDNSSHKTPDSLEPSPLKESPCRDSLESSPVEPKMKAGIFPSHFPLPAAVAKTELLTEVASVRSRLLRDPDGSAEDDSLEQTSLMESSGKSPLSPDTPSSEEVSYEVTPKTTDVSTPKPAVIHECAEEDDSENGEKKRFTPEEEMFKMVTKIKMFDELEQEAKQKRDYKKEPKQEESSSSSDPDADCSVDVDEPKHTGSGEDESGVPVLVTSESRKVSSSSESEPELAQLKKGADSGLLPEPVIRVQPPSPLPSSMDSNSSPEEVQFQPVVSKQYTFKMNEDTQEEPGKSEEEKDSESHLAEDRHAVSTEAEDRSYDKLNRDTDQPKICDGHGCEAMSPSSSAAPVSSGLQSPTGDDVDEQPVIYKESLALQGTHEKDTEGEELDVSRAESPQADCPSESFSSSSSLPHCLVSEGKELDEDISATSSIQKTEVTKTDETFENLPKDCPSQDSSITTQTDRFSMDVPVSDLAENDEIYDPQITSPYENVPSQSFFSSEESKTQTDANHTTSFHSSEVYSVTITSPVEDVVVASSSSGTVLSKESNFEGQDIKMESQQESTLWEMQSDSVSSSFEPTMSATTTVVGEQISKVIITKTDVDSDSWSEIREDDEAFEARVKEEEQKIFGLMVDRQSQGTTPDTTPARTPTEEGTPTSEQNPFLFQEGKLFEMTRSGAIDMTKRSYADESFHFFQIGQESREETLSEDVKEGATGADPLPLETSAESLALSESKETVDDEADLLPDDVSEEVEEIPASDAQLNSQMGISASTETPTKEAVSVGTKDLPTVQTGDIPPLSGVKQISCPDSSEPAVQVQLDFSTLTRSVYSDRGDDSPDSSPEEQKSVIEIPTAPMENVPFTESKSKIPVRTMPTSTPAPPSAEYESSVSEDFLSSVDEENKADEAKPKSKLPVKVPLQRVEQQLSDLDTSVQKTVAPQGQDMASIAPDNRSKSESDASSLDSKTKCPVKTRSYTETETESRERAEELELESEEGATRPKILTSRLPVKSRSTTSSCRGGTSPTKESKEHFFDLYRNSIEFFEEISDEASKLVDRLTQSEREQEIVSDDESSSALEVSVIENLPPVETEHSVPEDIFDTRPIWDESIETLIERIPDENGHDHAEDPQDEQERIEERLAYIADHLGFSWTELARELDFTEEQIHQIRIENPNSLQDQSHALLKYWLERDGKHATDTNLVECLTKINRMDIVHLMETNTEPLQERISHSYAEIEQTITLDHSEGFSVLQEELCTAQHKQKEEQAVSKESETCDHPPIVSEEDISVGYSTFQDGVPKTEGDSSATALFPQTHKEQVQQDFSGKMQDLPEESSLEYQQEYFVTTPGTETSETQKAMIVPSSPSKTPEEVSTPAEEEKLYLQTPTSSERGGSPIIQEPEEPSEHREESSPRKTSLVIVESADNQPETCERLDEDAAFEKGDDMPEIPPETVTEEEYIDEHGHTVVKKVTRKIIRRYVSSEGTEKEEIMVQGMPQEPVNIEEGDGYSKVIKRVVLKSDTEQSEDNNE

SEQ ID NO: 225 - protein, 2041 aa, Homo sapiens
MLEAIDKNRALHAAERLQTKLRERGDVANEDKLSLLKSVLQSPLFSQILSLQTSVQQLKDQVNIATSATSNIEYAHVPHLSPAVIPTLQNESFLLSPNNGNLEALTGPGIPHINGKPACDEFDQLIKNMAQGRHVEVFELLKPPSGGLGFSVVGLRSENRGELGIFVQEIQEGSVAHRDGRLKETDQILAINGQALDQTITHQQAISILQKAKDTVQLVIARGSLPQLVSPIVSRSPSAASTISAHSNPVHWQHMETIELVNDGSGLGFGIIGGKATGVIVKTILPGGVADQHGRLCSGDHILKIGDTDLAGMSSEQVAQVLRQCGNRVKLMIARGAIEERTAPTALGITLSSSPTSTPELRVDASTQKGEESETFDVELTKNVQGLGITIAGYIGDKKLEPSGIFVKSITKSSAVEHDGRIQIGDQIIAVDGTNLQGFTNQQAVEVLRHTGQTVLLTLMRRGMKQEAELMSREDVTKDADLSPVNASIIKENYEKDEDFLSSTRNTNILPTEEEGYPLLSAEIEEIEDAQKQEAALLTKWQRIMGINYEIVVAHVSKFSENSGLGISLEATVGHHFIRSVLPEGPVGHSGKLFSGDELLEVNGITLLGENHQDVVNILKELPIEVTMVCCRRTVPPTTQSELDSLDLCDIELTEKPHVDLGEFIGSSETEDPVLAMTDAGQSTEEVQAPLAMWEAGIQHIELEKGSKGLGFSILDYQDPIDPASTVIIIRSLVPGGIAEKDGRLLPGDRLMFVNDVNLENSSLEEAVEALKGAPSGTVRIGVAKPLPLSPEEGYVSAKEDSFLYPPHSCEEAGLADKPLFRADLALVGTNDADLVDESTFESPYSPENDSIYSTQASILSLHGSSCGDGLNYGSSLPSSPPKDVIENSCDPVLDLHMSLEELYTQNLLQRQDENTPSVDISMGPASGFTINDYTPANAIEQQYECENTIVWTESHLPSEVISSAELPSVLPDSAGKGSEYLLEQSSLACNAECVMLQNVSKESFERTINIAKGNSSLGMTVSANKDGLGMIVRSIIHGGAISRDGRIAIGDCILSINEESTISVTNAQARAMLRRHSLIGPDIKITYVPAEHLEEFKISLGQQSGRVMALDIFSSYTGRDIPELPEREEGEGEESELQNTAYSNWNQPRRVELWREPSKSLGISIVGGRGMGSRLSNGEVMRGIFIKHVLEDSPAGKNGTLKPGDRIVEVDGMDLRDASHEQAVEAIRKAGNPVVFMVQSIINRPRKSPLPSLLHNLYPKYNFSSTNPFADSLQINADKAPSQSESEPEKAPLCSVPPPPPSAFAEMGSDHTQSSASKISQDVDKEDEFGYSWKNIRERYGTLTGELHMIELEKGHSGLGLSLAGNKDRSRMSVFIVGIDPNGAAGKDGRLQIADELLEINGQILYGRSHQNASSIIKCAPSKVKIIFIRNKDAVNQMAVCPGNAVEPLPSNSENLQNKETEPTVTTSDAAVDLSSFKNVQHLELPKDQGGLGIAISEEDTLSGVIIKSLTEHGVAATDGRLKVGDQILAVDDEIVVGYPIEKFISLLKTAKMTVKLTIHAENPDSQAVPSAAGAASGEKKNSSQSLMVPQSGSPEPESIRNTSRSSTPAIFASDPATCPIIPGCETTIEISKGRTGLGLSIVGGSDTLLGAIIIHEVYEEGAACKDGRLWAGDQILEVNGIDLRKATHDEAINVLRQTPQRVRLTLYRDEAPYKEEEVCDTLTIELQKKPGKGLGLSIVGKRNDTGVFVSDIVKGGIADADGRLMQGDQILMVNGEDVRNATQEAVAALLKVSEGSLSSFTFPLSGSSTSESLESSSKKNALASEIQGLRTVEMKKGPTDSLGISIAGGVGSPLGDVPIFIAMMHPTGVAAQTQKLRVGDRIVTICGTSTEGMTHTQAVNLLKNASGSIEMQVVAGGDVSVVTGHQQEPASSSLSFTGLTSSSIFQDDLGPPQCKSITLERGPDGLGFSIVGGYGSPHGDLPIYVKTVFAKGAASEDGRLKRGDQIIAVNGQSLEGVTHEEAVAILKRTKGTVTLMVLS

SEQ ID NO: 226 - protein, 1898 aa, Homo sapiens
MAPEPAPGRTMVPLVPALVMLGLVAGAHGDSKPVFIKVPEDQTGLSGGVASFVCQATGEPKPRITWMKKGKKVSSQRFEVIEFDDGAGSVLRIQPLRVQRDEAIYECTATNSLGEINTSAKLSVLEEEQLPPGFPSIDMGPQLKVVEKARTATMLCAAGGNPDPEISWFKDFLPVDPATSNGRIKQLRSGALQIESSEESDQGKYECVATNSAGTRYSAPANLYVRVRRVAPRFSIPPSSQEVMPGGSVNLTCVAVGAPMPYVKWMMGAEELTKEDEMPVGRNVLELSNVVRSANYTCVAISSLGMIEATAQVTVKALPKPPIDLVVTETTATSVTLTWDSGNSEPVTYYGIQYRAAGTEGPFQEVDGVATTRYSIGGLSPFSEYAFRVLAVNSIGRGPPSEAVRARTGEQAPSSPPRRVQARMLSASTMLVQWEPPEEPNGLVRGYRVYYTPDSRRPPNAWHKHNTDAGLLTTVGSLLPGITYSLRVLAFTAVGDGPPSPTIQVKTQQGVPAQPADFQAEVESDTRIQLSWLLPPQERIIMYELVYWAAEDEDQQHKVTFDPTSSYTLEDLKPDTLYRFQLAARSDMGVGVFTPTIEARTAQSTPSAPPQKVMCVSMGSTTVRVSWVPPPADSRNGVITQYSVAYEAVDGEDRGRHVVDGISREHSSWDLVGLEKWTEYRVWVRAHTDVGPGPESSPVLVRTDEDVPSGPPRKVEVEPLNSTAVHVYWKLPVPSKQHGQIRGYQVTYVRLENGEPRGLPIIQDVMLAEAQETTISGLTPETTYSVTVAAYTTKGDGARSKPKIVTTTGAVPGRPTMMISTTAMNTALLQWHPPKELPGELLGYRLQYCRADEARPNTIDFGKDDQHFTVTGLHKGTTYIFRLAAKNRAGLGEEFEKEIRTPEDLPSGFPQNLHVTGLTTSTTELAWDPPVLAERNGRIISYTVVFRDINSQQELQNITTDTRFTLTGLKPDTTYDIKVRAWTSKGSGPLSPSIQSRTMPVEQVFAKNFRVAAAMKTSVLLSWEVPDSYKSAVPFKILYNGQSVEVDGHSMRKLIADLQPNTEYSFVLMNRGSSAGGLQHLVSIRTAPDLLPHKPLPASAYIEDGRFDLSMPHVQDPSLVRWFYIVVVPIDRVGGSMLTPRWSTPEELELDELLEAIEQGGEEQRRRRRQAERLKPYVAAQLDVLPETFTLGDKKNYRGFYNRPLSPDLSYQCFVLASLKEPMDQKRYASSPYSDEIVVQVTPAQQQEEPEMLWVTGPVLAVILIILIVIAILLFKRKRTHSPSSKDEQSIGLKDSLLAHSSDPVEMRRLNYQTPGMRDHPPIPITDLADNIERLKANDGLKFSQEYESIDPGQQFTWENSNLEVNKPKNRYANVIAYDHSRVILTSIDGVPGSDYINANYIDGYRKQNAYIATQGPLPETMGDFWRMVWEQRTATVVMMTRLEEKSRVKCDQYWPARGTETCGLIQVTLLDTVELATYTVRTFALHKSGSSEKRELRQFQFMAWPDHGVPEYPTPILAFLRRVKACNPLDAGPMVVHCSAGVGRTGCFIVIDAMLERMKHEKTVDIYGHVTCMRSQRNYMVQTEDQYVFIHEALLEAATCGHTEVPARNLYAHIQKLGQVPPGESVTAMELEFKLLASSKAHTSRFISANLPCNKFKNRLVNIMPYELTRVCLQPIRGVEGSDYINASFLDGYRQQKAYIATQGPLAESTEDFWRMLWEHNSTIIVMLTKLREMGREKCHQYWPAERSARYQYFVVDPMAEYNMPQYILREFKVTDARDGQSRTIRQFQFTDWPEQGVPKTGEGFIDFIGQVHKTKEQFGQDGPITVHCSAGVGRTGVFITLSIVLERMRYEGVVDMFQTVKTLRTQRPAMVQTEDQYQLCYRAALEYLGSFDHYAT

SEQ ID NO: 227 - protein, 3014 aa, Homo sapiens
MAPPPPPVLPVLLLLAAAAALPAMGLRAAAWEPRVPGGTRAFALRPGCTYAVGAACTPRAPRELLDVGRDGRLAGRRRVSGAGRPLPLQVRLVARSAPTALSRRLRARTHLPGCGARARLCGTGARLCGALCFPVPGGCAAAQHSALAAPTTLPACRCPPRPRPRCPGRPICLPPGGSVRLRLLCALRRAAGAVRVGLALEAATAGTPSASPSPSPPLPPNLPEARAGPARRARRGTSGRGSLKFPMPNYQVALFENEPAGTLILQLHAHYTIEGEEERVSYYMEGLFDERSRGYFRIDSATGAVSTDSVLDRETKETHVLRVKAVDYSTPPRSATTYITVLVKDTNDHSPVFEQSEYRERVRENLEVGYEVLTIRASDRDSPINANLRYRVLGGAWDVFQLNESSGVVSTRAVLDREEAAEYQLLVEANDQGRNPGPLSATATVYIEVEDENDNYPQFSEQNYVVQVPEDVGLNTAVLRVQATDRDQGQNAAIHYSILSGNVAGQFYLHSLSGILDVINPLDFEDVQKYSLSIKAQDGGRPPLINSSGVVSVQVLDVNDNEPIFVSSPFQATVLENVPLGYPVVHIQAVDADSGENARLHYRLVDTASTFLGGGSAGPKNPAPTPDFPFQIHNSSGWITVCAELDREEVEHYSFGVEAVDHGSPPMSSSTSVSITVLDVNDNDPVFTQPTYELRLNEDAAVGSSVLTLQARDRDANSVITYQLTGGNTRNRFALSSQRGGGLITLALPLDYKQEQQYVLAVTASDGTRSHTAHVLINVTDANTHRPVFQSSHYTVSVSEDRPVGTSIATLSANDEDTGENARITYVIQDPVPQFRIDPDSGTMYTMMELDYENQVAYTLTIMAQDNGIPQKSDTTTLEILILDANDNAPQFLWDFYQGSIFEDAPPSTSILQVSATDRDSGPNGRLLYTFQGGDDGDGDFYIEPTSGVIRTQRRLDRENVAVYNLWALAVDRGSPTPLSASVEIQVTILDINDNAPMFEKDELELFVEENNPVGSVVAKIRANDPDEGPNAQIMYQIVEGDMRHFFQLDLLNGDLRAMVELDFEVRREYVLVVQATSAPLVSRATVHILLVDQNDNPPVLPDFQILFNNYVTNKSNSFPTGVIGCIPAHDPDVSDSLNYTFVQGNELRLLLLDPATGELQLSRDLDNNRPLEALMEVSVSDGIHSVTAFCTLRVTIITDDMLTNSITVRLENMSQEKFLSPLLALFVEGVAAVLSTTKDDVFVFNVQNDTDVSSNILNVTFSALLPGGVRGQFFPSEDLQEQIYLNRTLLTTISTQRVLPFDDNICLREPCENYMKCVSVLRFDSSAPFLSSTTVLFRPIHPINGLRCRCPPGFTGDYCETEIDLCYSDPCGANGRCRSREGGYTCECFEDFTGEHCEVDARSGRCANGVCKNGGTCVNLLIGGFHCVCPPGEYERPYCEVTTRSFPPQSFVTFRGLRQRFHFTISLTFATQERNGLLLYNGRFNEKHDFIALEIVDEQVQLTFSAGETTTTVAPKVPSGVSDGRWHSVQVQYYNKPNIGHLGLPHGPSGEKMAVVTVDDCDTTMAVRFGKDIGNYSCAAQGTQTGSKKSLDLTGPLLLGGVPNLPEDFPVHNRQFVGCMRNLSVDGKNVDMAGFIANNGTREGCAARRNFCDGRRCQNGGTCVNRWNMYLCECPLRFGGKNCEQAMPHPQLFSGESVVSWSDLNIIISVPWYLGLMFRTRKEDSVLMEATSGGPTSFRLQILNNYLQFEVSHGPSDVESVMLSGLRVTDGEWHHLLIELKNVKEDSEMKHLVTMTLDYGMDQNKADIGGMLPGLTVRSVVVGGASEDKVSVRRGFRGCMQGVRMGGTPTNVATLNMNNALKVRVKDGCDVDDPCTSSPCPPNSRCHDAWEDYSCVCDKGYLGINCVDACHLNPCENMGACVRSPGSPQGYVCECGPSHYGPYCENKLDLPCPRGWWGNPVCGPCHCAVSKGFDPDCNKTNGQCQCKENYYKLLAQDTCLPCDCFPHGSHSRTCDMATGQCACKPGVIGRQCNRCDNPFAEVTTLGCEVIYNGCPKAFEAGIWWPQTKFGQPAAVPCPKGSVGNAVRHCSGEKGWLPPELFNCTTISFVDLRAMNEKLSRNETQVDGARALQLVRALRSATQHTGTLFGNDVRTAYQLLGHVLQHESWQQGFDLAATQDADFHEDVIHSGSALLAPATRAAWEQIQRSEGGTAQLLRRLEGYFSNVARNVRRTYLRPFVIVTANMILAVDIFDKFNFTGARVPRFDTIHEEFPRELESSVSFPADFFRPPEEKEGPLLRPAGRRTTPQTTRPGPGTEREAPISRRRRHPDDAGQFAVALVIIYRTLGQLLPERYDPDRRSLRLPHRPIINTPMVSTLVYSEGAPLPRPLERPVLVEFALLEVEERTKPVCVFWNHSLAVGGTGGWSARGCELLSRNRTHVACQCSHTASFAVLMDISRRENGEVLPLKIVTYAAVSLSLAALLVAFVLLSLVRMLRSNLHSIHKHLAVALFLSQLVFVIGINQTENPFLCTVVAILLHYIYMSTFAWTLVESLHVYRMLTEVRNIDTGPMRFYYVVGWGIPAIVTGLAVGLDPQGYGNPDFCWLSLQDTLIWSFAGPIGAVIIINTVTSVLSAKVSCQRKHHYYGKKGIVSLLRTAFLLLLLISATWLLGLLAVNRDALSFHYLFAIFSGLQGPFVLLFHCVLNQEVRKHLKGVLGGRKLHLEDSATTRATLLTRSLNCNTTFGDGPDMLRTDLGESTASLDSIVRDEGIQKLGVSSGLVRGSHGEPDASLMPRSCKDPPGHDSDSDSELSLDEQSSSYASSHSSDSEDDGVGAEEKWDPARGAVHSTPKGDAVANHVPAGWPDQSLAESDSEDPSGKPRLKVETKVSVELHREEQGSHRGEYPPDQESGGAARLASSQPPEQRKGILKNKVTYPPPLTLTEQTLKGRLREKLADCEQSPTSSRTSSLGSGGPDCAITVKSPGREPGRDHLNGVAMNVRTGSAQADGSDSEKP

SEQ ID NO: 228 - protein, 1893 aa, Homo sapiens
MARLADYFVLVAFGPHPRGSGEGQGQILQRFPEKDWEDNPFPQGIELFCQPSGWQLCPERNPPTFFVAVLTDINSERHYCACLTFWEPAEPSQETTRVEDATEREEEGDEGGQTHLSPTAPAPSAQLFAPKTLVLVSRLDHTEVFRNSLGLIYAIHVEGLNVCLENVIGNLLTCTVPLAGGSQRTISLGAGDRQVIQTPLADSLPVSRCSVALLFRQLGITNVLSLFCAALTEHKVLFLSRSYQRLADACRGLLALLFPLRYSFTYVPILPAQLLEVLSTPTPFIIGVNAAFQAETQELLDVIVADLDGGTVTIPECVHIPPLPEPLQSQTHSVLSMVLDPELELADLAFPPPTTSTSSLKMQDKELRAVFLRLFAQLLQGYRWCLHVVRIHPEPVIRFHKAAFLGQRGLVEDDFLMKVLEGMAFAGFVSERGVPYRPTDLFDELVAHEVARMRADENHPQRVLRHVQELAEQLYKNENPYPAVAMHKVQRPGESSHLRRVPRPFPRLDEGTVQWIVDQAAAKMQGAPPAVKAERRTTVPSGPPMTAILERCSGLHVNSARRLEVVRNCISYVFEGKMLEAKKLLPAVLRALKGRAARRCLAQELHLHVQQNRAVLDHQQFDFVVRMMNCCLQDCTSLDEHGIAAALLPLVTAFCRKLSPGVTQFAYSCVQEHVVWSTPQFWEAMFYGDVQTHIRALYLEPTEDLAPAQEVGEAPSQEDERSALDVASEQRRLWPTLSREKQQELVQKEESTVFSQAIHYANRMSYLLLPLDSSKSRLLRERAGLGDLESASNSLVTNSMAGSVAESYDTESGFEDAETCDVAGAVVRFINRFVDKVCTESGVTSDHLKGLHVMVPDIVQMHIETLEAVQRESRRLPPIQKPKLLRPRLLPGEECVLDGLRVYLLPDGREEGAGGSAGGPALLPAEGAVFLTTYRVIFTGMPTDPLVGEQVVVRSFPVAALTKEKRISVQTPVDQLLQDGLQLRSCTFQLLKMAFDEEVGSDSAELFRKQLHKLRYPPDIRATFAFTLGSAHTPGRPPRVTKDKGPSLRTLSRNLVKNAKKTIGRQHVTRKKYNPPSWEHRGQPPPEDQEDEISVSEELEPSTLTPSSALKPSDRMTMSSLVERACCRDYQRLGLGTLSSSLSRAKSEPFRISPVNRMYAICRSYPGLLIVPQSVQDNALQRVSRCYRQNRFPVVCWRSGRSKAVLLRSGGLHGKGVVGLFKAQNAPSPGQSQADSSSLEQEKYLQAVVSSMPRYADASGRNTLSGFSSAHMGSHVPSPRARVTTLSNPMAASASRRTAPRGKWGSVRTSGRSSGLGTDVGSRLAGRDALAPPQANGGPPDPGFLRPQRAALYILGDKAQLKGVRSDPLQQWELVPIEVFEARQVKASFKKLLKACVPGCPAAEPSPASFLRSLEDSEWLIQIHKLLQVSVLVVELLDSGSSVLVGLEDGWDITTQVVSLVQLLSDPFYRTLEGFRLLVEKEWLSFGHRFSHRGAHTLAGQSSGFTPVFLQFLDCVHQVHLQFPMEFEFSQFYLKFLGYHHVSRRFRTFLLDSDYERIELGLLYEEKGERRGQVPCRSVWEYVDRLSKRTPVFHNYMYAPEDAEVLRPYSNVSNLKVWDFYTEETLAEGPPYDWELAQGPPEPPEEERSDGGAPQSRRRVVWPCYDSCPRAQPDAISRLLEELQRLETELGQPAERWKDTWDRVKAAQRLEGRPDGRGTPSSLLVSTAPHHRRSLGVYLQEGPVGSTLSLSLDSDQSSGSTTSGSRQAARRSTSTLYSQFQTAESENRSYEGTLYKKGAFMKPWKARWFVLDKTKHQLRYYDHRVDTECKGVIDLAEVEAVAPGTPTMGAPKTVDEKAFFDVKTTRRVYNFCAQDVPSAQQWVDRIQSCLSDA

SEQ ID NO: 229 - protein, 3097 aa, Homo sapiens
MSGSSGGAAAPAASSGPAAAASAAGSGCGGGAGEGAEEAAKDLADIAAFFRSGFRKNDEMKAMDVLPILKEKVAYLSGGRDKRGGPILTFPARSNHDRIRQEDLRRLISYLACIPSEEVCKRGFTVIVDMRGSKWDSIKPLLKILQESFPCCIHVALIIKPDNFWQKQRTNFGSSKFEFETNMVSLEGLTKVVDPSQLTPEFDGCLEYNHEEWIEIRVAFEDYISNATHMLSRLEELQDILAKKELPQDLEGARNMIEEHSQLKKKVIKAPIEDLDLEGQKLLQRIQSSESFPKKNSGSGNADLQNLLPKVSTMLDRLHSTRQHLHQMWHVRKLKLDQCFQLRLFEQDAEKMFDWITHNKGLFLNSYTEIGTSHPHAMELQTQHNHFAMNCMNVYVNINRIMSVANRLVESGHYASQQIRQIASQLEQEWKAFAAALDERSTLLDMSSIFHQKAEKYMSNVDSWCKACGEVDLPSELQDLEDAIHHHQGIYEHITLAYSEVSQDGKSLLDKLQRPLTPGSSDSLTASANYSKAVHHVLDVIHEVLHHQRQLENIWQHRKVRLHQRLQLCVFQQDVQQVLDWIENHGEAFLSKHTGVGKSLHRARALQKRHEDFEEVAQNTYTNADKLLEAAEQLAQTGECDPEEIYQAAHQLEDRIQDFVRRVEQRKILLDMSVSFHTHVKELWTWLEELQKELLDDVYAESVEAVQDLIKRFGQQQQTTLQVTVNVIKEGEDLIQQLRDSAISSNKTPHNSSINHIETVLQQLDEAQSQMEELFQERKIKLELFLQLRIFERDAIDIISDLESWNDELSQQMNDFDTEDLTIAEQRLQHHADKALTMNNLTFDVIHQGQDLLQYVNEVQASGVELLCDRDVDMATRVQDLLEFLHEKQQELDLAAEQHRKHLEQCVQLRHLQAEVKQVLGWIRNGESMLNAGLITASSLQEAEQLQREHEQFQHAIEKTHQSALQVQQKAEAMLQANHYDMDMIRDCAEKVASHWQQLMLKMEDRLKLVNASVAFYKTSEQVCSVLESLEQEYKREEDWCGGADKLGPNSETDHVTPMISKHLEQKEAFLKACTLARRNADVFLKYLHRNSVNMPGMVTHIKAPEQQVKNILNELFQRENRVLHYWTMRKRRLDQCQQYVVFERSAKQALEWIHDNGEFYLSTHTSTGSSIQHTQELLKEHEEFQITAKQTKERVKLLIQLADGFCEKGHAHAAEIKKCVTAVDKRYRDFSLRMEKYRTSLEKALGISSDSNKSSKSLQLDIIPASIPGSEVKLRDAAHELNEEKRKSARRKEFIMAELIQTEKAYVRDLRECMDTYLWEMTSGVEEIPPGIVNKELIIFGNMQEIYEFHNNIFLKELEKYEQLPEDVGHCFVTWADKFQMYVTYCKNKPDSTQLILEHAGSYFDEIQQRHGLANSISSYLIKPVQRITKYQLLLKELLTCCEEGKGEIKDGLEVMLSVPKRANDAMHLSMLEGFDENIESQGELILQESFQVWDPKTLIRKGRERHLFLFEMSLVFSKEVKDSSGRSKYLYKSKLFTSELGVTEHVEGDPCKFALWVGRTPTSDNKIVLKASSIENKQDWIKHIREVIQERTIHLKGALKEPIHIPKTAPATRQKGRRDGEDLDSQGDGSSQPDTISIASRTSQNTLDSDKLSGGCELTVVIHDFTACNSNELTIRRGQTVEVLERPHDKPDWCLVRTTDRSPAAEGLVPCGSLCIAHSRSSMEMEGIFNHKDSLSVSSNDASPPASVASLQPHMIGAQSSPGPKRPGNTLRKWLTSPVRRLSSGKADGHVKKLAHKHKKSREVRKSADAGSQKDSDDSAATPQDETVEERGRNEGLSSGTLSKSSSSGMQSCGEEEGEEGADAVPLPPPMAIQQHSLLQPDSQDDKASSRLLVRPTSSETPSAAELVSAIEELVKSKMALEDRPSSLLVDQGDSSSPSFNPSDNSLLSSSSPIDEMEERKSSSLKRRHYVLQELVETERDYVRDLGYVVEGYMALMKEDGVPDDMKGKDKIVFGNIHQIYDWHRDFFLGELEKCLEDPEKLGSLFVKHERRLHMYIAYCQNKPKSEHIVSEYIDTFFEDLKQRLGHRLQLTDLLIKPVQRIMKYQLLLKDFLKYSKKASLDTSELERAVEVMCIVPRRCNDMMNVGRLQGFDGKIVAQGKLLLQDTFLVTDQDAGLLPRCRERRIFLFEQIVIFSEPLDKKKGFSMPGFLFKNSIKVSCLCLEENVENDPCKFALTSRTGDVVETFILHSSSPSVRQTWIHEINQILENQRNFLNALTSPIEYQRNHSGGGGGGGSGGSGGGGGSGGGGAPSGGSGHSGGPSSCGGAPSTSRSRPSRIPQPVRHHPPVLVSSAASSQAEADKMSGTSTPGPSLPPPGAAPEAGPSAPSRRPPGADAEGSEREAEPIPKMKVLESPRKGAANASGSSPDAPAKDARASLGTLPLGKPRAGAASPLNSPLSSAVPSLGKEPFPPSSPLQKGGSFWSSIPASPASRPGSFTFPGDSDSLQRQTPRHAAPGKDTDRMSTCSSASEQSVQSTQSNGSESSSSSNISTMLVTHDYTAVKEDEINVYQGEVVQILASNQQNMFLVFRAATDQCPAAEGWIPGFVLGHTSAVIVENPDGTLKKSTSWHTALRLRKKSEKKDKDGKREGKLENGYRKSREGLSNKVSVKLLNPNYIYDVPPEFVIPLSEVTCETGETVVLRCRVCGRPKASITWKGPEHNTLNNDGHYSISYSDLGEATLKIVGVTTEDDGIYTCIAVNDMGSASSSASLRVLGPGMDGIMVTWKDNFDSFYSEVAELGRGRFSVVKKCDQKGTKRAVATKFVNKKLMKRDQVTHELGILQSLQHPLLVGLLDTFETPTSYILVLEMADQGRLLDCVVRWGSLTEGKIRAHLGEVLEAVRYLHNCRIAHLDLKPENILVDESLAKPTIKLADFGDAVQLNTTYYIHQLLGNPEFAAPEIILGNPVSLTSDTWSVGVLTYVLLSGVSPFLDDSVEETCLNICRLDFSFPDDYFKGVSQKAKEFVCFLLQEDPAKRPSAALALQEQWLQAGNGRSTGVLDTSRLTSFIERRKHQNDVRPIRSIKNFLQSRLLPRV

SEQ ID NO: 230 - protein, 376 aa, Homo sapiens
MDVLAEANGTFALNLLKTLGKDNSKNVFFSPMSMSCALAMVYMGAKGNTAAQMAQILSFNKSGGGGDIHQGFQSLLTEVNKTGTQYLLRMANRLFGEKSCDFLSSFRDSCQKFYQAEMEELDFISAVEKSRKHINTWVAEKTEGKIAELLSPGSVDPLTRLVLVNAVYFRGNWDEQFDKENTEERLFKVSKNEEKPVQMMFKQSTFKKTYIGEIFTQILVLPYVGKELNMIIMLPDETTDLRTVEKELTYEKFVEWTRLDMMDEEEVEVSLPRFKLEESYDMESVLRNLGMTDAFELGKADFSGMSQTDLSLSKVVHKSFVEVNEEGTEAAAATAAIMMMRCARFVPRFCADHPFLFFIQHSKTNGILFCGRFSSP

SEQ ID NO: 231 - protein, 4012 aa, Homo sapiens
MGVLKVWLGLALALAEFAVLPHHSEGACVYQDSLLADATIWKPDSCQSCRCHGDIVICKPAVCRNPQCAFEKGEVLQIAANQCCPECVLRTPGSCHHEKKIHEHGTEWASSPCSVCSCNHGEVRCTPQPCPPLSCGHQELAFIPEGSCCPVCVGLGKPCSYEGHVFQDGEDWRLSRCAKCLCRNGVAQCFTAQCQPLFCNQDETVVRVPGKCCPQCSARSCSAAGQVYEHGEQWSENACTTCICDRGEVRCHKQACLPLRCGKGQSRARRHGQCCEECVSPAGSCSYDGVVRYQDEMWKGSACEFCMCDHGQVTCQTGECAKVECARDEELIHLDGKCCPECISRNGYCVYEETGEFMSSNASEVKRIPEGEKWEDGPCKVCECRGAQVTCYEPSCPPCPVGTLALEVKGQCCPDCTSVHCHPDCLTCSQSPDHCDLCQDPTKLLQNGWCVHSCGLGFYQAGSLCLACQPQCSTCTSGLECSSCQPPLLMRHGQCVPTCGDGFYQDRHSCAVCHESCAGCWGPTEKHCLACRDPLHVLRDGGCESSCGKGFYNRQGTCSACDQSCDSCGPSSPRCLTCTEKTVLHDGKCMSECPGGYYADATGRCKVCHNSCASCSGPTPSHCTACSPPKALRQGHCLPRCGEGFYSDHGVCKACHSSCLACMGPAPSHCTGCKKPEEGLQVEQLSDVGIPSGECLAQCRAHFYLESTGICEACHQSCFRCAGKSPHNCTDCGPSHVLLDGQCLSQCPDGYFHQEGSCTECHPTCRQCHGPLESDCISCYPHISLTNGNCRTSCREEQFLNLVGYCADCHHLCQHCAADLHNTGSICLRCQNAHYLLLGDHCVPDCPSGYYAERGACKKCHSSCRTCQGRGPFSCSSCDTNLVLSHTGTCSTTCFPGHYLDDNHVCQPCNTHCGSCDSQASCTSCRDPNKVLLFGECQYESCAPQYYLDFSTNTCKECDWSCSACSGPLKTDCLQCMDGYVLQDGACVEQCLSSFYQDSGLCKNCDSYCLQCQGPHECTRCKGPFLLLEAQCVQECGKGYFADHAKHKCTACPQGCLQCSHRDRCHLCDHGFFLKSGLCVYNCVPGFSVHTSNETCSGKIHTPSLHVNGSLILPIGSIKPLDFSLLNVQDQEGRVEDLLFHVVSTPTNGQLVLSRNGKEVQLDKAGRFSWKDVNEKKVRFVHSKEKLRKGYLFLKISDQQFFSEPQLINIQAFSTQAPYVLRNEVLHISRGERATITTQMLDIRDDDNPQDVVIEIIDPPLHGQLLQTLQSPATPIYQFQLDELSRGLLHYAHDGSDSTSDVAVLQANDGHSFHNILFQVKTVPQNDRGLQLVANSMVWVPEGGMLQITNRILQAEAPGASAEEIIYKITQDYPQFGEVVLLVNMPADSPADEGQHLPDGRTATPTSTFTQQDINEGIVWYRHSGAPAQSDSFRFEVSSASNAQTRLESHMFNIAILPQTPEAPKVSLEASLHMTAREDGLTVIQPHSLSFINSEKPSGKIVYNITLPLHPNQGIIEHRDHPHSPIRYFTQEDINQGKVMYRPPPAAPHLQELMAFSFAGLPESVKFHFTVSDGEHTSPEMVLTIHLLPSDQQLPVFQVTAPRLAVSPGGSTSVGLQVVVRDAETAPKELFFELRRPPQHGVLLKHTAEFRRPMATGDTFTYEDVEKNALQYIHDGSSTREDSMEISVTDGLTVTMLEVRVEVSLSEDRGPRLAAGSSLSITVASKSTAIITRSHLAYVDDSSPDPEIWIQLNYLPSYGTLLRISGSEVEELSEVSNFTMEDINNKKIRYSAVFETDGHLVTDSFYFSVSDMDHNHLDNQIFTIMITPAENPPPVIAFADLITVDEGGRAPLSFHHFFATDDDDNLQRDAIIKLSALPKYGCIENTGTGDRFGPETASDLEASFPIQDVLENYIYYFQSVHESIEPTHDIFSFYVSDGTSRSEIHSINITIERKNDEPPRMTLQPLRVQLSSGVVISNSSLSLQDLDTPDNELIFVLTKKPDHGHVLWRQTASEPLENGRVLVQGSTFTYQDILAGLVGYVPSVPGMVVDEFQFSLTDGLHVDTGRMKIYTELPASDTPHLAINQGLQLSAGSVARITEQHLKVTDIDSDDHQVMYIMKEDPGAGRLQMMKHGNLEQISIKGPIRSFTQADISQGHVEYSHGTGEPGGSFAFKFDVVDGEGNRLIDKSFSISILEDKSPPVITTNKGLVLDENSVKKITTLQLSATDQDSGPTELIYRITRQPQLGHLEHAASPGIQISSFTQADLTSRNVQYVHSSEAEKHSDAFSFTLSDGVSEVTQTFHITLHPVDDSLPVVQNLGMRVQEGMRKTITEFELKAVDADTEAESVTFTIVQPPRHGTIERTSNGQHFHLTSTFTMKDIYQNRVSYSHDGSNSLKDRFTFTVSDGTNPFFIIEEGGKEIMTAAPQPFRVDILPVDDGTPRIVTNLGLQWLEYMDGKATNLITKKELLTMDPDTEDAQLVYEITTGPKHGFVENKLQPGRAAATFTQEDVNLGLIRYVLHKEKIREMMDSFQFLVKDSKPNVVSDNVFHIQWSLISFKYTSYNVSEKAGSVSVTVQRTGNLNQYAIVLCRTEQGTASSSSRVSSQPGQQDYVEYAGQVQFDEREDTKSCTIVINDDDVFENVESFTVELSMPAYALLGEFTQAKVIINDTEDEPTLEFDKKIYWVNESAGFLFAPIERKGDASSIVSAICYTVPKSAMGSSLYALESGSDFKSRGMSAASRVIFGPGVTMSTCDVMLIDDSEYEEEEEFEIALADASDNARIGRVATAKVLISGPNDASTVSLGNTAFTVSEDAGTVKIPVIRHGTDLSTFASVWCATRPSDPASATPGVDYVPSSRKVEFGPGVIEQYCTLTILDDTQYPVIEGLETFVVFLSSAQGAELTKPFQAVIAINDTFQDVPSMQFAKDLLLVKEKEGVLHVPITRSGDLSYESSVRCYTQSHSAQVMEDFEERQNADSSRITFLKGDKVKNCTVYIHDDSMFEPEEQFRVYLGLPLGNHWSGARIGKNNMATITISNDEDAPTIEFEEAAYQVREPAGPDAIAILNIKVIRRGDQNRTSKVRCSTRDGSAQSGVDYYPKSRVLKFSPGVDHIFFKVEILSNEDREWHESFSLVLGPDDPVEAVLGDVTTATVTILDQEAAGSLILPAPPIVVTLADYDHVEEVTKEGVKKSPSPGYPLVCVTPCDPHFPRYAVMKERCSEAGINQTSVQFSWEVAAPTDGNGARSPFETITDNTPFTSVNHMVLDSIYFSRRFHVRCVAKAVDKVGHVGTPLRSNIVTIGTDSAICHTPVVAGTSRGFQAQSFIATLKYLDVKHKEHPNRIHISVQIPHQDGMLPLISTMPLHNLHFLLSESIYRHQHVCSNLVTTYDLRGISEAGFLDDVVYDSTALGPGYDRPFQFDPSVREPKTIQLYKHLNLKSCVWTFDAYYDMTELIDVCGGSVTADFQVRDSAQSFLTVHVPLYVSYIYVTAPRGWASLEHHTEMEFSFFYDTVLWRTGIQTDSVLSARLQIIRIYIREDGRLVIEFKTHAKFRGQFVMEHHTLPEVKSFVLTPDHLGGIEFDLQLLWSAQTFDSPHQLWRATSSYNRKDYSGEYTIYLIPCTVQPTQPWVDPGEKPLACTAHAPERFLIPIAFQQTNRPVPVVYSLNTEFQLCNNEKVFLMDPNTSDMSLAEMDYKGAFSKGQILYGRVLWNPEQNLNSAYKLQLEKVYLCTGKDGYVPFFDPTGTIYNEGPQYGCIQPNKHLKHRFLLLDRNQPEVTDKYFHDVPFEAHFASELPDFHVVSNMPGVDGFTLKVDALYKVEAGHQWYLQVIYIIGPDTISGPRVQRSLTAPLRRNRRDLVEPDGQLILDDSLIYDNEGDQVKNGTNMKSLNLEMQELAVAASLSQTGASIGSALAAIMLLLLVFLVACFINRKCQKQRKKKPAEDILEEYPLNTKVEVPKRHPDRVEKNVNRHYCTVRNVNILSEPEAAYTFKGAKVKRLNLEVRVHNNLQDGTEV

SEQ ID NO: 232 - protein, 2696 aa, Homo sapiens
MDQTCELPRRNCLLPFSNPVNLDAPEDKDSPFGNGQSNFSEPLNGCTMQLSTVSGTSQNAYGQDSPSCYIPLRRLQDLASMINVEYLNGSADGSESFQDPEKSDSRAQTPIVCTSLSPGGPTALAMKQEPSCNNSPELQVKVTKTIKNGFLHFENFTCVDDADVDSEMDPEQPVTEDESIEEIFEETQTNATCNYETKSENGVKVAMGSEQDSTPESRHGAVKSPFLPLAPQTETQKNKQRNEVDGSNEKAALLPAPFSLGDTNITIEEQLNSINLSFQDDPDSSTSTLGNMLELPGTSSSSTSQELPFCQPKKKSTPLKYEVGDLIWAKFKRRPWWPCRICSDPLINTHSKMKVSNRRPYRQYYVEAFGDPSERAWVAGKAIVMFEGRHQFEELPVLRRRGKQKEKGYRHKVPQKILSKWEASVGLAEQYDVPKGSKNRKCIPGSIKLDSEEDMPFEDCTNDPESEHDLLLNGCLKSLAFDSEHSADEKEKPCAKSRARKSSDNPKRTSVKKGHIQFEAHKDERRGKIPENLGLNFISGDISDTQASNELSRIANSLTGSNTAPGSFLFSSCGKNTAKKEFETSNGDSLLGLPEGALISKCSREKNKPQRSLVCGSKVKLCYIGAGDEEKRSDSISICTTSDDGSSDLDPIEHSSESDNSVLEIPDAFDRTENMLSMQKNEKIKYSRFAATNTRVKAKQKPLISNSHTDHLMGCTKSAEPGTETSQVNLSDLKASTLVHKPQSDFTNDALSPKFNLSSSISSENSLIKGGAANQALLHSKSKQPKFRSIKCKHKENPVMAEPPVINEECSLKCCSSDTKGSPLASISKSGKVDGLKLLNNMHEKTRDSSDIETAVVKHVLSELKELSYRSLGEDVSDSGTSKPSKPLLFSSASSQNHIPIEPDYKFSTLLMMLKDMHDSKTKEQRLMTAQNLVSYRSPGRGDCSTNSPVGVSKVLVSGGSTHNSEKKGDGTQNSANPSPSGGDSALSGELSASLPGLLSDKRDLPASGKSRSDCVTRRNCGRSKPSSKLRDAFSAQMVKNTVNRKALKTERKRKLNQLPSVTLDAVLQGDRERGGSLRGGAEDPSKEDPLQIMGHLTSEDGDHFSDVHFDSKVKQSDPGKISEKGLSFENGKGPELDSVMNSENDELNGVNQVVPKKRWQRLNQRRTKPRKRMNRFKEKENSECAFRVLLPSDPVQEGRDEFPEHRTPSASILEEPLTEQNHADCLDSAGPRLNVCDKSSASIGDMEKEPGIPSLTPQAELPEPAVRSEKKRLRKPSKWLLEYTEEYDQIFAPKKKQKKVQEQVHKVSSRCEEESLLARGRSSAQNKQVDENSLISTKEEPPVLEREAPFLEGPLAQSELGGGHAELPQLTLSVPVAPEVSPRPALESEELLVKTPGNYESKRQRKPTKKLLESNDLDPGFMPKKGDLGLSKKCYEAGHLENGITESCATSYSKDFGGGTTKIFDKPRKRKRQRHAAAKMQCKKVKNDDSSKEIPGSEGELMPHRTATSPKETVEEGVEHDPGMPASKKMQGERGGGAALKENVCQNCEKLGELLLCEAQCCGAFHLECLGLTEMPRGKFICNECRTGIHTCFVCKQSGEDVKRCLLPLCGKFYHEECVQKYPPTVMQNKGFRCSLHICITCHAANPANVSASKGRLMRCVRCPVAYHANDFCLAAGSKILASNSIICPNHFTPRRGCRNHEHVNVSWCFVCSEGGSLLCCDSCPAAFHRECLNIDIPEGNWYCNDCKAGKKPHYREIVWVKVGRYRWWPAEICHPRAVPSNIDKMRHDVGEFPVLFFGSNDYLWTHQARVFPYMEGDVSSKDKMGKGVDGTYKKALQEAAARFEELKAQKELRQLQEDRKNDKKPPPYKHIKVNRPIGRVQIFTADLSEIPRCNCKATDENPCGIDSECINRMLLYECHPTVCPAGGRCQNQCFSKRQYPEVEIFRTLQRGWGLRTKTDIKKGEFVNEYVGELIDEEECRARIRYAQEHDITNFYMLTLDKDRIIDAGPKGNYARFMNHCCQPNCETQKWSVNGDTRVGLFALSDIKAGTELTFNYNLECLGNGKTVCKCGAPNCSGFLGVRPKNQPIATEEKSKKFKKKQQGKRRTQGEITKEREDECFSCGDAGQLVSCKKPGCPKVYHADCLNLTKRPAGKWECPWHQCDICGKEAASFCEMCPSSFCKQHREGMLFISKLDGRLSCTEHDPCGPNPLEPGEIREYVPPPVPLPPGPSTHLAEQSTGMAAQAPKMSDKPPADTNQMLSLSKKALAGTCQRPLLPERPLERTDSRPQPLDKVRDLAGSGTKSQSLVSSQRPLDRPPAVAGPRPQLSDKPSPVTSPSSSPSVRSQPLERPLGTADPRLDKSIGAASPRPQSLEKTSVPTGLRLPPPDRLLITSSPKPQTSDRPTDKPHASLSQRLPPPEKVLSAVVQTLVAKEKALRPVDQNTQSKNRAALVMDLIDLTPRQKERAASPHQVTPQADEKMPVLESSSWPASKGLGHMPRAVEKGCVSDPLQTSGKAAAPSEDPWQAVKSLTQARLLSQPPAKAFLYEPTTQASGRASAGAEQTPGPLSQSPGLVKQAKQMVGGQQLPALAAKSGQSFRSLGKAPASLPTEEKKLVTTEQSPWALGKASSRAGLWPIVAGQTLAQSCWSAGSTQTLAQTCWSLGRGQDPKPEQNTLPALNQAPSSHKCAESEQK

SEQ ID NO: 233 - protein, 2752 aa, Homo sapiens
MYNGIGLPTPRGSGTNGYVQRNLSLVRGRRGERPDYKGEEELRRLEAALVKRPNPDILDHERKRRVELRCLELEEMMEEQGYEEQQIQEKVATFRLMLLEKDVNPGGKEETPGQRPAVTETHQLAELNEKKNERLRAAFGISDSYVDGSSFDPQRRAREAKQPAPEPPKPYSLVRESSSSRSPTPKQKKKKKKKDRGRRSESSSPRRERKKSSKKKKHRSESESKKRKHRSPTPKSKRKSKDKKRKRSRSTTPAPKSRRAHRSTSADSASSSDTSRSRSRSAAAKTHTTALAGRSPSPASGRRGEGDAPFSEPGTTSTQRPSSPETATKQPSSPYEDKDKDKKEKSATRPSPSPERSSTGPEPPAPTPLLAERHGGSPQPLATTPLSQEPVNPPSEASPTRDRSPPKSPEKLPQSSSSESSPPSPQPTKVSRHASSSPESPKPAPAPGSHREISSSPTSKNRSHGRAKRDKSHSHTPSRRMGRSRSPATAKRGRSRSRTPTKRGHSRSRSPQWRRSRSAQRWGRSRSPQRRGRSRSPQRPGWSRSRNTQRRGRSRSARRGRSHSRSPATRGRSRSRTPARRGRSRSRTPARRRSRSRTPTRRRSRSRTPARRGRSRSRTPARRRSRTRSPVRRRSRSRSPARRSGRSRSRTPARRGRSRSRTPARRGRSRSRTPARRSGRSRSRTPARRGRSRSRTPRRGRSRSRSLVRRGRSHSRTPQRRGRSGSSSERKNKSRTSQRRSRSNSSPEMKKSRISSRRSRSLSSPRSKAKSRLSLRRSLSGSSPCPKQKSQTPPRRSRSGSSQPKAKSRTPPRRSRSSSSPPPKQKSKTPSRQSHSSSSPHPKVKSGTPPRQGSITSPQANEQSVTPQRRSCFESSPDPELKSRTPSRHSCSGSSPPRVKSSTPPRQSPSRSSSPQPKVKAIISPRQRSHSGSSSPSPSRVTSRTTPRRSRSVSPCSNVESRLLPRYSHSGSSSPDTKVKPETPPRQSHSGSISPYPKVKAQTPPGPSLSGSKSPCPQEKSKDSLVQSCPGSLSLCAGVKSSTPPGESYFGVSSLQLKGQSQTSPDHRSDTSSPEVRQSHSESPSLQSKSQTSPKGGRSRSSSPVTELASRSPIRQDRGEFSASPMLKSGMSPEQSRFQSDSSSYPTVDSNSLLGQSRLETAESKEKMALPPQEDATASPPRQKDKFSPFPVQDRPESSLVFKDTLRTPPRERSGAGSSPETKEQNSALPTSSQDEELMEVVEKSEEPAGQILSHLSSELKEMSTSNFESSPEVEERPAVSLTLDQSQSQASLEAVEVPSMASSWGGPHFSPEHKELSNSPLRENSFGSPLEFRNSGPLGTEMNTGFSSEVKEDLNGPFLNQLETDPSLDMKEQSTRSSGHSSSELSPDAVEKAGMSSNQSISSPVLDAVPRTPSRERSSSASSPEMKDGLPRTPSRRSRSGSSPGLRDGSGTPSRHSLSGSSPGMKDIPRTPSRGRSECDSSPEPKALPQTPRPRSRSPSSPELNNKCLTPQRERSGSESSVDQKTVARTPLGQRSRSGSSQELDVKPSASPQERSESDSSPDSKAKTRTPLRQRSRSGSSPEVDSKSRLSPRRSRSGSSPEVKDKPRAAPRAQSGSDSSPEPKAPAPRALPRRSRSGSSSKGRGPSPEGSSSTESSPEHPPKSRTARRGSRSSPEPKTKSRTPPRRRSSRSSPELTRKARLSRRSRSASSSPETRSRTPPRHRRSPSVSSPEPAEKSRSSRRRRSASSPRTKTTSRRGRSPSPKPRGLQRSRSRSRREKTRTTRRRDRSGSSQSTSRRRQRSRSRSRVTRRRRGGSGYHSRSPARQESSRTSSRRRRGRSRTPPTSRKRSRSRTSPAPWKRSRSRASPATHRRSRSRTPLISRRRSRSRTSPVSRRRSRSRTSVTRRRSRSRASPVSRRRSRSRTPPVTRRRSRSRTPTTRRRSRSRTPPVTRRRSRSRTPPVTRRRSRSRTSPITRRRSRSRTSPVTRRRSRSRTSPVTRRRSRSRTSPVTRRRSRSRTPPAIRRRSRSRTPLLPRKRSRSRSPLAIRRRSRSRTPRTARGKRSLTRSPPAIRRRSASGSSSDRSRSATPPATRNHSGSRTPPVALNSSRMSCFSRPSMSPTPLDRCRSPGMLEPLGSSRTPMSVLQQAGGSMMDGPGPRIPDHQRTSVPENHAQSRIALALTAISLGTARPPPSMSAAGLAARMSQVPAPVPLMSLRTAPAANLASRIPAASAAAMNLASARTPAIPTAVNLADSRTPAAAAAMNLASPRTAVAPSAVNLADPRTPTAPAVNLAGARTPAALAALSLTGSGTPPTAANYPSSSRTPQAPASANLVGPRSAHATAPVNIAGSRTAAALAPASLTSARMAPALSGANLTSPRVPLSAYERVSGRTSPPLLDRARSRTPPSAPSQSRMTSERAPSPSSRMGQAPSQSLLPPAQDQPRSPVPSAFSDQSRCLIAQTTPVAGSQSLSSGAVATTTSSAGDHNGMLSVPAPGVPHSDVGEPPASTGAQQPSALAALQPAKERRSSSSSSSSSSSSSSSSSSSSSSSSSGSSSSDSEGSSLPVQPEVALKRVPSPTPAPKEAVREGRPPEPTPAKRKRRSSSSSSSSSSSSSSSSSSSSSSSSSSSSSSSSSSSSSSSSSSPSPAKPGPQALPKPASPKKPPPGERRSRSPRKPIDSLRDSRSLSYSPVERRRPSPQPSPRDQQSSSSERGSRRGQRGDSRSPSHKRRRETPSPRPMRHRSSRSP

SEQ ID NO: 234 - protein, 3130 aa, Homo sapiens
MFSVRIVTADYYMASPLQGLDTCQSPLTQAPVKKVPVVRVFGATPAGQKTCLHLHGIFPYLYVPYDGYGQQPESYLSQMAFSIDRALNVALGNPSSTAQHVFKVSLVSGMPFYGYHEKERHFMKIYLYNPTMVKRICELLQSGAIMNKFYQPHEAHIPYLLQLFIDYNLYGMNLINLAAVKFRKARRKSNTLHATGSCKNHLSGNSLADTLFRWEQDEIPSSLILEGVEPQSTCELEVDAVAADILNRLDIEAQIGGNPGLQAIWEDEKQRRRNRNETSQMSQPESQDHRFVPATESEKKFQKRLQEILKQNDFSVTLSGSVDYSDGSQEFSAELTLHSEVLSPEMLQCTPANMVEVHKDKESSKGHTRHKVEEALINEEAILNLMENSQTFQPLTQRLSESPVFMDSSPDEALVHLLAGLESDGYRGERNRMPSPCRSFGNNKYPQNSDDEENEPQIEKEEMELSLVMSQRWDSNIEEHCAKKRSLCRNTHRSSTEDDDSSSGEEMEWSDNSLLLASLSIPQLDGTADENSDNPLNNENSRTHSSVIATSKLSVKPSIFHKDAATLEPSSSAKITFQCKHTSALSSHVLNKEDLIEDLSQTNKNTEKGLDNSVTSFTNESTYSMKYPGSLSSTVHSENSHKENSKKEILPVSSCESSIFDYEEDIPSVTRQVPSRKYTNIRKIEKDSPFIHMHRHPNENTLGKNSFNFSDLNHSKNKVSSEGNEKGNSTALSSLFPSSFTENCELLSCSGENRTMVHSLNSTADESGLNKLKIRYEEFQEHKTEKPSLSQQAAHYMFFPSVVLSNCLTRPQKLSPVTYKLQPGNKPSRLKLNKRKLAGHQETSTKSSETGSTKDNFIQNNPCNSNPEKDNALASDLTKTTRGAFENKTPTDGFIDCHFGDGTLETEQSFGLYGNKYTLRAKRKVNYETEDSESSFVTHNSKISLPHPMEIGESLDGTLKSRKRRKMSKKLPPVIIKYIIINRFRGRKNMLVKLGKIDSKEKQVILTEEKMELYKKLAPLKDFWPKVPDSPATKYPIYPLTPKKSHRRKSKHKSAKKKTGKQQRTNNENIKRTLSFRKKRSHAILSPPSPSYNAETEDCDLNYSDVMSKLGFLSERSTSPINSSPPRCWSPTDPRAEEIMAAAEKEAMLFKGPNVYKKTVNSRIGKTSRARAQIKKSKAKLANPSIVTKKRNKRNQTNKLVDDGKKKPRAKQKTNEKGTSRKHTTLKDEKIKSQSGAEVKFVLKHQNVSEFASSSGGSQLLFKQKDMPLMGSAVDHPLSASLPTGINAQQKLSGCFSSFLESKKSVDLQTFPSSRDDLHPSVVCNSIGPGVSKINVQRPHNQSAMFTLKESTLIQKNIFDLSNHLSQVAQNTQISSGMSSKIEDNANNIQRNYLSSIGKLSEYRNSLESKLDQAYTPNFLHCKDSQQQIVCIAEQSKHSETCSPGNTASEESQMPNNCFVTSLRSPIKQIAWEQKQRGFILDMSNFKPERVKPRSLSEAISQTKALSQCKNRNVSTPSAFGEGQSGLAVLKELLQKRQQKAQNANTTQDPLSNKHQPNKNISGSLEHNKANKRTRSVTSPRKPRTPRSTKQKEKIPKLLKVDSLNLQNSSQLDNSVSDDSPIFFSDPGFESCYSLEDSLSPEHNYNFDINTIGQTGFCSFYSGSQFVPADQNLPQKFLSDAVQDLFPGQAIEKNEFLSHDNQKCDEDKHHTTDSASWIRSGTLSPEIFEKSTIDSNENRRHNQWKNSFHPLTTRSNSIMDSFCVQQAEDCLSEKSRLNRSSVSKEVFLSLPQPNNSDWIQGHTRKEMGQSLDSANTSFTAILSSPDGELVDVACEDLELYVSRNNDMLTPTPDSSPRSTSSPSQSKNGSFTPRTANILKPLMSPPSREEIMATLLDHDLSETIYQEPFCSNPSDVPEKPREIGGRLLMVETRLANDLAEFEGDFSLEGLRLWKTAFSAMTQNPRPGSPLRSGQGVVNKGSSNSPKMVEDKKIVIMPCKCAPSRQLVQVWLQAKEEYERSKKLPKTKPTGVVKSAENFSSSVNPDDKPVVPPKMDVSPCILPTTAHTKEDVDNSQIALQAPTTGCSQTASESQMLPPVASASDPEKDEDDDDNYYISYSSPDSPVIPPWQQPISPDSKALNGDDRPSSPVEELPSLAFENFLKPIKDGIQKSPCSEPQEPLVISPINTRARTGKCESLCFHSTPIIQRKLLERLPEAPGLSPLSTEPKTQKLSNKKGSNTDTLRRVLLTQAKNQFAAVNTPQKETSQIDGPSLNNTYGFKVSIQNLQEAKALHEIQNLTLISVELHARTRRDLEPDPEFDPICALFYCISSDTPLPDTEKTELTGVIVIDKDKTVFSQDIRYQTPLLIRSGITGLEVTYAADEKALFHEIANIIKRYDPDILLGYEIQMHSWGYLLQRAAALSIDLCRMISRVPDDKIENRFAAERDEYGSYTMSEINIVGRITLNLWRIMRNEVALTNYTFENVSFHVLHQRFPLFTFRVLSDWFDNKTDLYRWKMVDHYVSRVRGNLQMLEQLDLIGKTSEMARLFGIQFLHVLTRGSQYRVESMMLRIAKPMNYIPVTPSVQQRSQMRAPQCVPLIMEPESRFYSNSVLVLDFQSLYPSIVIAYNYCFSTCLGHVENLGKYDEFKFGCTSLRVPPDLLYQVRHDITVSPNGVAFVKPSVRKGVLPRMLEEILKTRFMVKQSMKAYKQDRALSRMLDARQLGLKLIANVTFGYTSANFSGRMPCIEVGDSIVHKARETLERAIKLVNDTKKWGARVVYGDTDSMFVLLKGATKEQSFKIGQEIAEAVTATNPKPVKLKFEKVYLPCVLQTKKRYVGYMYETLDQKDPVFDAKGIETVRRDSCPAVSKILERSLKLLFETRDISLIKQYVQRQCMKLLEGKASIQDFIFAKEYRGSFSYKPGACVPALELTRKMLTYDRRSEPQVGERVPYVIIYGTPGVPLIQLVRRPVEVLQDPTLRLNATYYITKQILPPLARIFSLIGIDVFSWYHELPRIHKATSSSRSEPEGRKGTISQYFTTLHCPVCDDLTQHGICSKCRSQPQHVAVILNQEIRELERQQEQLVKICKNCTGCFDRHIPCVSLNCPVLFKLSRVNRELSKAPYLRQLLDQF

SEQ ID NO: 235 - protein, 2229 aa, Homo sapiens
MSDRLGQITKGKDGKSKYSTLSLFDKYKGKSVDAIRSSVIPRHGLQSLGKVAAARRMPPPANLPSLKSENKGNDPNIVIVPKDGTGWANKQDQQDPKSSSATASQPPESLPQPGLQKSVSNLQKPTQSISQENTNSVPGGPKSWAQLNGKPVGHEGGLRGSSRLLSFSPEEFPTLKAAGGQDKAGKEKGVLDLSYGPGPSLRPQNVTSWREGGGRHIISATSLSTSPTELGSRNSSTGDGAPSSACTSDSKDPSLRPAQPVRKGASQFMGNVYHPPTYHDMLPAFMCSPKSSENQGTVERGSFPLPQLRLEPRVPFRQFQMNDQDGKENRLGLSRPLRPLRQLVERAPRPTIINAENLKGLDDLDADADDGWAGLHEEVDYSEKLKFSDDEEEEEVVKDGRPKWNSWDPRRQRQLSMSSADSADAKRTREEGKDWAEAVGASRVVRKAPDPQPPPRKLHGWAPGPDYQKSSMGSMFRQQSIEDKEDKPPPRQKFIQSEMSEAVERARKRREEEERRAREERLAACAAKLKQLDQKCKQARKAGEARKQAEKEVPWSPSAEKASPQENGPAVHKGSPEFPAQETPTTFPEEAPTVSPAVAQSNSSEEEAREAGSPAQEFKYQKSLPPRFQRQQQQQQQEQLYKMQHWQPVYPPPSHPQRTFYPHHPQMLGFDPRWMMMPSYMDPRITPTRTPVDFYPSALHPSGLMKPMMPQESLNGTGCRSEDQNCVPPLQERKVTPIDSPPVWSPEGYMALQSKGYPLPHPKSSDTLAMDMRVRNESSFSASLGRAGGVSAQRDLFEERGEEYLSAFDKKAQADFDSCISSQRIGQELLFPPQENVQDAGAPGGHTQNLRCSPLEPDFVPDEKKPECGSWDVSHQPETADTAHGVERETPREGTAFNISSWDKNGSPNKQPSSEPEWTPEPRSSSSQHPEQTGRTRRSGPIKKPVLKALKVEDKEKELEKIKQELGEESTRLAKEKEQSPTAEKDEDEENDASLANSSTTTLEDKGPGHATFGREATKFEEEEKPDKAWEARPPRESSDVPPMKRNNWIFIDEEQAFGVRGQARGRGRGFREFTFRGRPAGGNGSGLCGGGVLGARSIYCSSQRSGRGRGLREFARPEDCPRAKPRRRVASETHSEGSEYEELPKRRRQRGSENGNEGSLLEREESTLKKGDCRDSWRSNKGCSEDHSGLDAKSRGPRAFGRALPPRLSNCGYGRRTFVSKESPHWQSKSPGSSWQEYGPSDTCGSRRPTDRDYVPDSYRHPDAFGGRGFEDSRAEDKRSFFQDEHVADSENAENRPFRRRRPPRQDKPPRFRRLRQERESLGLWGPEEEPHLLAGQWPGRPKLCSGDKSGTVGRRSPELSYQNSSDHANEEWETASESSDFSERRERREGPGSEPDSQVDGGLSGASLGEKKELAKRSFSSQRPVVDRQSRKLEPGGFGEKPVRPGGGDTSPRYESQQNGTPLKVKRSPDEALPGGLSGCSSGSGHSPYALERAAHASADLPEASSKKAEKEAKLAAPRAGEQGEAMKQFDLNYGSAIIENCGSSPGEESEVGSMVGEGFIEVLTKKQRRLLEEERRKKEQAVQVPVKGRGLSSRIPPRFAKKQNNLCLEQGDVTVPGSSLGTEIWESSSQALPVQAPANDSWRKAVTAFSSTETGSAEQGFKSSQGDSGVDLSAESRESSATSSQRSSPYGTLKPEEMSGPGLAEPKADSHKEQAPKPSEQKDSEQGSGQSKEHRPGPIGNERSLKNRKGSEGAERLQGAVVPPVNGVEIHVDSVLPVPPIEFGVSPKDSDFSLPPGSASGPTGSPVVKLQDALASNAGLTQSIPILRRDHHIQRAIGLSPMSFPTADLTLKMESARKAWENSPSLPEQSSPGGAGSGIQPPSSVGASSGVNYSSFGGVSMPPMPVASVAPSASMPGSHLPPLYLDGHVFASQPRLVPQTIPQQQSYQQAAAAQQIPISLHTSLQAQAQLGLRGGLPVSQSQEIFSSLQPFRSQVYMHPSLSPPSTMILSGGTALKPPYSAFPGMQPLEMVKPQSGSPYQPMSGNQALVYEGQLSQAAGLGASQMLDSQLPQLTMPLPRYGSGQQPLILPQSIQLPPGQSLSVGAPRRIPPPGSQPPVLNTSREPSQMEMKGFHFADSKQNVPSGGPVPSPQTYRPSSASPSGKPSGSAVNMGSVQGHYVQQAKQRVDEKPSLGAVKLQEAPSAASQMKRTGAIKPRAVKVEESKA

SEQ ID NO: 236 - protein, 2328 aa, Homo sapiens
MTSATEFENVGNQPPYSRINARWDAPDDELDNDNSSARLFERSRIKALADEREVVQKKTFTKWVNSHLARVSCRITDLYKDLRDGRMLIKLLEVLSGEMLPKPTKGKMRIHCLENVDKALQFLKEQRVHLENMGSHDIVDGNHRLVLGLIWTIILRFQIQDIVVQTQEGRETRSAKDALLLWCQMKTAGYPHVNVTNFTSSWKDGLAFNALIHKHRPDLIDFDKLKDSNARHNLEHAFNVAERQLGIIPLLDPEDVFTENPDEKSIITYVVAFYHYFSKMKVLAVEGKRVGKVIDHAIETEKMIEKYSGLASDLLTWIEQTITVLNSRKFANSLTGVQQQLQAFSTYRTVEKPPKFQEKGNLEVLLFTIQSRMRANNQKVYTPHDGKLVSDINRAWESLEEAEYRRELALRNELIRQEKLEQLARRFDRKAAMRETWLSENQRLVAQDNFGYDLAAVEAAKKKHEAIETDTAAYEERVRALEDLAQELEKENYHDQKRITARKDNILRLWSYLQELLQSRRQRLETTLALQKLFQDMLHSIDWMDEIKAHLLSAEFGKHLLEVEDLLQKHKLMEADIAIQGDKVKAITAATLKFTEGKGYQPCDPQVIQDRISHLEQCFEELSNMAAGRKAQLEQSKRLWKFFWEMDEAESWIKEKEQIYSSLDYGKDLTSVLILQRKHKAFEDELRGLDAHLEQIFQEAHGMVARKQFGHPQIEARIKEVSAQWDQLKDLAAFCKKNLQDAENFFQFQGDADDLKAWLQDAHRLLSGEDVGQDEGATRALGKKHKDFLEELEESRGVMEHLEQQAQGFPEEFRDSPDVTHRLQALRELYQQVVAQADLRQQRLQEALDLYTVFGETDACELWMGEKEKWLAEMEMPDTLEDLEVVQHRFDILDQEMKTLMTQIDGVNLAANSLVESGHPRSREVKQYQDHLNTRWQAFQTLVSERREAVDSALRVHNYCVDCEETSKWITDKTKVVESTKDLGRDLAGIIAIQRKLSGLERDVAAIQARVDALERESQQLMDSHPEQKEDIGQRQKHLEELWQGLQQSLQGQEDLLGEVSQLQAFLQDLDDFQAWLSITQKAVASEDMPESLPEAEQLLQQHAGIKDEIDGHQDSYQRVKESGEKVIQGQTDPEYLLLGQRLEGLDTGWNALGRMWESRSHTLAQCLGFQEFQKDAKQAEAILSNQEYTLAHLEPPDSLEAAEAGIRKFEDFLGSMENNRDKVLSPVDSGNKLVAEGNLYSDKIKEKVQLIEDRHRKNNEKAQEASVLLRDNLELQNFLQNCQELTLWINDKLLTSQDVSYDEARNLHNKWLKHQAFVAELASHEGWLENIDAEGKQLMDEKPQFTALVSQKLEALHRLWDELQATTKEKTQHLSAARSSDLRLQTHADLNKWISAMEDQLRSDDPGKDLTSVNRMLAKLKRVEDQVNVRKEELGELFAQVPSMGEEGGDADLSIEKRFLDLLEPLGRRKKQLESSRAKLQISRDLEDETLWVEERLPLAQSADYGTNLQTVQLFMKKNQTLQNEILGHTPRVEDVLQRGQQLVEAAEIDCQDLEERLGHLQSSWDRLREAAAGRLQRLRDANEAQQYYLDADEAEAWIGEQELYVISDEIPKDEEGAIVMLKRHLRQQRAVEDYGRNIKQLASRAQGLLSAGHPEGEQIIRLQGQVDKHYAGLKDVAEERKRKLENMYHLFQLKRETDDLEQWISEKELVASSPEMGQDFDHVTLLRDKFRDFARETGAIGQERVDNVNAFIERLIDAGHSEAATIAEWKDGLNEMWADLLELIDTRMQLLAASYDLHRYFYTGAEILGLIDEKHRELPEDVGLDASTAESFHRVHTAFERELHLLGVQVQQFQDVATRLQTAYAGEKAEAIQNKEQEVSAAWQALLDACAGRRTQLVDTADKFRFFSMARDLLSWMESIIRQIETQERPRDVSSVELLMKYHQGINAEIETRSKNFSACLELGESLLQRQHQASEEIREKLQQVMSRRKEMNEKWEARWERLRMLLEVCQFSRDASVAEAWLIAQEPYLASGDFGHTVDSVEKLIKRHEAFEKSTASWAERFAALEKPTTLELKERQIAERPAEETGPQEEEGETAGEAPVSHHAATERTSPGEEEGTWPQNLQQPPPPGQHKDGQKSTGDERPTTEPLFKVLDTPLSEGDEPATLPAPRDHGQSVQMEGYLGRKHDLEGPNKKASNRSWNNLYCVLRNSELTFYKDAKNLALGMPYHGEEPLALRHAICEIAANYKKKKHVFKLRLSNGSEWLFHGKDEEEMLSWLQGVSTAINESQSIRVKAQSLPLPSLSGPDASLGKKDKEKRFSFFPKKK

SEQ ID NO: 237 - protein, 3477 aa, Homo sapiens
MANRRVGRGCWEVSPTERRPPAGLRGPAAEEEASSPPVLSLSHFCRSPFLCFGDVLLGASRTLSLALDNPNEEVAEVKISHFPAADLGFSVSQRCFVLQPKEKIVISVNWTPLKEGRVREIMTFLVNDVLKHQAILLGNAEEQKKKKRSLWDTIKKKKISASTSHNRRVSNIQNVNKTFSVSQKVDRVRSPLQACENLAMNEGGPPTENNSLILEENKIPISPISPAFNECHGATCLPLSVRRSTTYSSLHASENRELLNVHSANVSKVSFNEKAVTETSFNSVNVNGQRGENSKLSLTPNCSSTLNITQSQIHFLSPDSFVNNSHGANNELELVTCLSSDMFMKDNSQPVHLESTIAHEIYQKILSPDSFIKDNYGLNQDLESESVNPILSPNQFLKDNMAYMCTSQQTCKVPLSNENSQVPQSPEDWRKSEVSPRIPECQGSKSPKAIFEELVEMKSNYYSFIKQNNPKFSAVQDISSHSHNKQPKRRPILSATVTKRKATCTRENQTEINKPKAKRCLNSAVGEHEKVINNQKEKEDFHSYLPIIDPILSKSKSYKNEVTPSSTTASVARKRKSDGSMEDANVRVAITEHTEVREIKRIHFSPSEPKTSAVKKTKNVTTPISKRISNREKLNLKKKTDLSIFRTPISKTNKRTKPIIAVAQSSLTFIKPLKTDIPRHPMPFAAKNMFYDERWKEKQEQGFTWWLNFILTPDDFTVKTNISEVNAATLLLGIENQHKISVPRAPTKEEMSLRAYTARCRLNRLRRAACRLFTSEKMVKAIKKLEIEIEARRLIVRKDRHLWKDVGERQKVLNWLLSYNPLWLRIGLETTYGELISLEDNSDVTGLAMFILNRLLWNPDIAAEYRHPTVPHLYRDGHEEALSKFTLKKLLLLVCFLDYAKISRLIDHDPCLFCKDAEFKASKEILLAFSRDFLSGEGDLSRHLGLLGLPVNHVQTPFDEFDFAVTNLAVDLQCGVRLVRTMELLTQNWDLSKKLRIPAISRLQKMHNVDIVLQVLKSRGIELSDEHGNTILSKDIVDRHREKTLRLLWKIAFAFQVDISLNLDQLKEEIAFLKHTKSIKKTISLLSCHSDDLINKKKGKRDSGSFEQYSENIKLLMDWVNAVCAFYNKKVENFTVSFSDGRVLCYLIHHYHPCYVPFDAICQRTTQTVECTQTGSVVLNSSSESDDSSLDMSLKAFDHENTSELYKELLENEKKNFHLVRSAVRDLGGIPAMINHSDMSNTIPDEKVVITYLSFLCARLLDLRKEIRAARLIQTTWRKYKLKTDLKRHQEREKAARIIQLAVINFLAKQRLRKRVNAALVIQKYWRRVLAQRKLLMLKKEKLEKVQNKAASLIQGYWRRYSTRQRFLKLKYYSIILQSRIRMIIAVTSYKRYLWATVTIQRHWRAYLRRKQDQQRYEMLKSSTLIIQSMFRKWKQRKMQSQVKATVILQRAFREWHLRKQAKEENSAIIIQSWYRMHKELRKYIYIRSCVVIIQKRFRCFQAQKLYKRRKESILTIQKYYKAYLKGKIERTNYLQKRAAAIQLQAAFRRLKAHNLCRQIRAACVIQSYWRMRQDRVRFLNLKKTIIKFQAHVRKHQQRQKYKKMKKAAVIIQTHFRAYIFAMKVLASYQKTRSAVIVLQSAYRGMQARKMYIHILTSVIKIQSYYRAYVSKKEFLSLKNATIKLQSTVKMKQTRKQYLHLRAAALFIQQCYRSKKIAAQKREEYMQMRESCIKLQAFVRGYLVRKQMRLQRKAVISLQSYFRMRKARQYYLKMYKAIIVIQNYYHAYKAQVNQRKNFLQVKKAATCLQAAYRGYKVRQLIKQQSIAALKIQSAFRGYNKRVKYQSVLQSIIKIQRWYRAYKTLHDTRTHFLKTKAAVISLQSAYRGWKVRKQIRREHQAALKIQSAFRMAKAQKQFRLFKTAALVIQQNFRAWTAGRKQCMEYIELRHAVLVLQSMWKGKTLRRQLQRQHKCAIIIQSYYRMHVQQKKWKIMKKAALLIQKYYRAYSIGREQNHLYLKTKAAVVTLQSAYRGMKVRKRIKDCNKAAVTIQSKYRAYKTKKKYATYRASAIIIQRWYRGIKITNHQHKEYLNLKKTAIKIQSVYRGIRVRRHIQHMHRAATFIKAMFKMHQSRISYHTMRKAAIVIQVRCRAYYQGKMQREKYLTILKAVKVLQASFRGVRVRRTLRKMQTAATLIQSNYRRYRQQTYFNKLKKITKTVQQRYWAMKERNIQFQRYNKLRHSVIYIQAIFRGKKARRHLKMMHIAATLIQRRFRTLMMRRRFLSLKKTAILIQRKYRAHLCTKHHLQFLQVQNAVIKIQSSYRRWMIRKRMREMHRAATFIQSTFRMHRLHMRYQALKQASVVIQQQYQANRAAKLQRQHYLRQRHSAVILQAAFRGMKTRRHLKSMHSSATLIQSRFRSLLVRRRFISLKKATIFVQRKYRATICAKHKLYQFLHLRKAAITIQSSYRRLMVKKKLQEMQRAAVLIQATFRMYRTYITFQTWKHASILIQQHYRTYRAAKLQRENYIRQWHSAVVIQAAYKGMKARQLLREKHKASIVIQSTYRMYRQYCFYQKLQWATKIIQEKYRANKKKQKVFQHNELKKETCVQAGFQDMNIKKQIQEQHQAAIIIQKHCKAFKIRKHYLHLRATVVSIQRRYRKLTAVRTQAVICIQSYYRGFKVRKDIQNMHRAATLIQSFYRMHRAKVDYETKKTAIVVIQNYYRLYVRVKTERKNFLAVQKSVRTIQAAFRGMKVRQKLKNVSEEKMAAIVNQSALCCYRSKTQYEAVQSEGVMIQEWYKASGLACSQEAEYHSQSRAAVTIQKAFCRMVTRKLETQKCAALRIQFFLQMAVYRRRFVQQKRAAITLQHYFRTWQTRKQFLLYRKAAVVLQNHYRAFLSAKHQRQVYLQIRSSVIIIQARSKGFIQKRKFQEIKNSTIKIQAMWRRYRAKKYLCKVKAACKIQAWYRCWRAHKEYLAILKAVKIIQGCFYTKLERTRFLNVRASAIIIQRKWRAILPAKIAHEHFLMIKRHRAACLIQAHYRGYKGRQVFLRQKSAALIIQKYIRAREAGKHERIKYIEFKKSTVILQALVRGWLVRKRFLEQRAKIRLLHFTAAAYYHLNAVRIQRAYKLYLAVKNANKQVNSVICIQRWFRARLQEKRFIQKYHSIKKIEHEGQECLSQRNRAASVIQKAVRHFLLRKKQEKFTSGIIKIQALWRGYSWRKKNDCTKIKAIRLSLQVVNREIREENKLYKRTALALHYLLTYKHLSAILEALKHLEVVTRLSPLCCENMAQSGAISKIFVLIRSCNRSIPCMEVIRYAVQVLLNVSKYEKTTSAVYDVENCIDILLELLQIYREKPGNKVADKGGSIFTKTCCLLAILLKTTNRASDVRSRSKVVDRIYSLYKLTAHKHKMNTERILYKQKKNSSISIPFIPETPVRTRIVSRLKPDWVLRRDNMEEITNPLQAIQMVMDTLGIPY

SEQ ID NO: 238 - protein, 3197 aa, Homo sapiens
MEIRLEILTSTGIKQKKPWPRVSWLGKEKEAVFLLDDKFINEINLLSGKIKKKIPSLQPFLKDVIVLTTSSNDAWLAGVLTTGELFLWNKDQDCLKTIPITEKPKEMIKATVASSLRLYLYVSGNGKRIVLITPSGCIFLWEYLELKNILSSKSLSLAGRWSQVIPEEAVLLPSTEDKEAVVNAVFIKNELFGDCCLCSFTFYSGECLKLTFLAIRWHENVFTSVRSLPYHVHWAQQDCHLCSLIPKCESVKSRGALISAFSRDGLTLAVTLNQKDPKATQVLFINTLNFVTLCGSLKGCSNKSPVVPATLIRSYWVGDISWTHDSLFLACMLKRGSLVLLTCQGELLTLITFGCSIEFGPAEFIPLHPLITYRPQQFTFQDSNNSVDSSASDSDPMRQRFSIKAHSRLPYLVISDGYMVTTLRFLDSLSPSVHMRSLLLDSTQRLEKIYQSVILSKPKGKGLNLRSLNSLRSSLLEHQGNESSADFTVPKFLQAEETINENAADFQDFEAEETNEGRHFPDNLCPFWNKRDDVLCSSMKEGRLEFASMFDTIHAKDDSEETDRTITELHSIQKSLLAAWTIGISKTVTEKNLMLNYIVVCITHFFYILQFIKCPFPKLDLVLSKSSRHNAWILCIFQLFHQCLSIHYWDIRYKQDVGHLIKLTSNTVKLLLTQQQKGQLFSEKLLACFYLLKMVADNLNGVYILQPEVISASADGSKITAQDSLVVPIFQMFQDSGFQKNWSWNSFFKIHPQVVNPVQQPGHRLLILWRILYKKTLWYQAQLNRRVPEADSQLTEKMTHEASTVKSLLCHLQANLQSTGDCLNQTLELKSINGEECFLLGSYEKSVQLWKKALQEIEEKGGRRTYFLQIRYYLSLLYCHLYSYNLNDAQGLCDQLAREILRWSQLPVKENKDFSGAAKSHFECGMVGGVHPEAAVRVVQSMARFMAAYFTNQQLCILPPHHVNVLPPLHIKTEQSFRLIPLQHSKVASVVRDQNLSNVWTVEYALELLFIGGLVPEAVWLAYKLGDWKTSVSIGVAFQLFCKRDSNFMRSKKKSLNLPLRMTPAQIFQEKLQCVLGQPASLEAKNEMGSKYKQFTDPIEEEDANLLFGSVQEVLKASVMADADILSETFQLLIDSAKDFSKRLWGLVPFGLYLPAPPLYCPQPAILSEEDGDDLLLKAEKNNRQKVSGILQRVLLLFRAAQCSFPVAQWYILQLRWARKVMQKIRMKGSLPSLSPFPQSLLNYCKGGIAFFRPGAAGDHKLDEVSIRAIGCFRELCALCWMLHVRDKLSYSCRQYQKARENVKGEKDLEVEFDSCMIEHCLSAVEWAYRMLPFSRFFNMEELIQDIILSLIGELPPIRKVAEIFVKAFPYPEDVRVPLRDKYHSLHQRLRHCVVKGPQTEEMMSVVMHSIQKVRVKALKRVQRNIGSFEVNIWEPIEEEKPDEAPGVDRYSLGTSLSRSTLTELGDSVVHSDADTFSEALSVEEKSRINIYQRNAPNHMELTSIHKPTDKRKMCNQKENPTKKEDHEKLSQNTLPVIGVWEFERDDDEYIKFLDLFLSYILERDLPYSRDADIPFLTSFSGKLREHELNSLLFDVHTTLKRHQSKTKSQNVFRAGSCFVVAPESYESEKSSSLNDEYGMHLENQKLSSSVLVNQGIKPFLQYPSNEVNKNEGMSGLFGLKQRSIYKIQDDTREKCLIQRSSNHIFWTPKSIKTRRCIFKAIQCNDINPQEDLPLALNTFGSIGRLLEWMIRWSNRRLLCDSGITESSSEYSPVIRVKTSTAAILTSLWLLEQPYFATYKAKNAIIKMVENRDTGCQIGPNIERESKSDAGGSVAVATPGGTEERNGQNKSCQNILNRMPTEAKNPDIKEINDDIISITHNTKKEFIDIDENLLEVEAFTEEEMDMHISDYEEDIEESVGGFRSPSLAICMMTLPQQLEEEFTEEVQCQREEPLETIMEEKSTEQKGMIEAFSHPGHTTPQSMQVDTSSEISSAQISTYKEKSSSVPLLISNGVNVASQPPAPTPQKTQRNEFTAQLPDCSESVRQMLQDEMFKLVQLQQINFMSLMQIVGSSFANLPDTQQLVQQSQSVHLGESQESNLRGCGDVEDSNKNLKERFFIKPQSMGENAREPRKNSPHCHEGTIPSGQNSTGNVQNVPHGSIPLCQLNGQPRKKGPIPSSQNLPSTSFYPAPAGNTHLYLLSTPSVVQKAPRLIPHAKTFSPGDGFPLLQFKSKQEFQPLFLHTGSIPQVPFRPLPQPREAWGLSDSFQPALPQRAAQTTPASHLNVSQYNTEARKKEVEQKTWAETVITEIPNHVNLDQYVGQENLTPQQDSSVFIKPEKLFDVKPGTLEISPHHSFGLPLLYLPLKPPNMFPSTSRASITVPSTPIQPIAEERKYPRLSLLHSHLSPENRCKKTQLIPLENLIAFKQSQQKLTHNLFEQGDAGHLQLLKVKIEPPEVRQGKDSKKRQRRRAEKELQEKRCEKLRRKPNVTFRPENSIINNDDSEIIKKPKEQQEHCGSHPLDDFDVPFEMLQDDNTSAGLHFMASVKKKAIGSQDASTNTDPEHEPLTAPQLLVPDVYLNLKLSSEMSEKPWSPSIPHTVTNLELPVREEPSNDNVIKQQSDHLAVPSSAELHYMAASVTNAVPPHNFKSQGLPKPEFRFKGQSTKSDSAEDYLLWKRLQGVSAACPAPSSAAHQLEHLSAKLQKIDEQLLAIQNIAENIEQDFPKPEMLDLHCDKIGPVDHIEFSSGPEFKKTLASKTISISEEVRFLTHMDEEDQSDKKETSEPEFSITENYSGQKTCVFPTADSAVSLSSSSDQNTTSPGMNSSDELCESVSVHPLQMTGLTDIADIIDDLIIKDGVSSEELGLTEQAMGTSRIQHYSGRHSQRTDKERREIQAWMKRKRKERMAKYLNELAEKRGQEHDPFCPRSNPLYMTSREIRLRQKMKHEKDRLLLSEHYSRRISQAYGLMNELLSESVQLPTLPQKPLPNKPSPTQSSSCQHCPSPRGENQHGHSFLINRPGKVKYMSKPSYIHKRKSFGQPQGSPWPHGTATFTIQKKAGGAKAAVRKATQSPVTFQKGSNAPCHSLQHTKKHGSAGLAPQTKQVCVEYEREETVVSPWTIPSEIHKILHESHNSLLQDLSPTEEEEPEHPFGVGGVDSVSESTGSILSKLDWNAIEDMVASVEDQGLSVHWALDL

SEQ ID NO: 239 - protein, 493 aa, Homo sapiens
MAAATGPSFWLGNETLKVPLALFALNRQRLCERLRKNPAVQAGSIVVLQGGEETQRYCTDTGVLFRQESFFHWAFGVTEPGCYGVIDVDTGKSTLFVPRLPASHATWMGKIHSKEHFKEKYAVDDVQYVDEIASVLTSQKPSVLLTLRGVNTDSGSVCREASFDGISKFEVNNTILHPEIVECRVFKTDMELEVLRYTNKISSEAHREVMKAVKVGMKEYELESLFEHYCYSRGGMRHSSYTCICGSGENSAVLHYGHAGAPNDRTIQNGDMCLFDMGGEYYCFASDITCSFPANGKFTADQKAVYEAVLRSSRAVMGAMKPGVWWPDMHRLADRIHLEELAHMGILSGSVDAMVQAHLGAVFMPHGLGHFLGIDVHDVGGYPEGVERIDEPGLRSLRTARHLQPGMVLTVEPGIYFIDHLLDEALADPARASFLNREVLQRFRGFGGVRIEEDVVVTDSGIELLTCVPRTVEEIEACMAGCDKAFTPFSGPK

SEQ ID NO: 240 - protein, 3075 aa, Homo sapiens
MRGGVLLVLLLCVAAQCRQRGLFPAILNLASNAHISTNATCGEKGPEMFCKLVEHVPGRPVRNPQCRICDGNSANPRERHPISHAIDGTNNWWQSPSIQNGREYHWVTITLDLRQVFQVAYVIIKAANAPRPGNWILERSLDGTTFSPWQYYAVSDSECLSRYNITPRRGPPTYRADDEVICTSYYSRLVPLEHGEIHTSLINGRPSADDLSPKLLEFTSARYIRLRLQRIRTLNADLMTLSHREPKELDPIVTRRYYYSIKDISVGGMCICYGHASSCPWDETTKKLQCQCEHNTCGESCNRCCPGYHQQPWRPGTVSSGNTCEACNCHNKAKDCYYDESVAKQKKSLNTAGQFRGGGVCINCLQNTMGINCETCIDGYYRPHKVSPYEDEPCRPCNCDPVGSLSSVCIKDDLHSDLHNGKQPGQCPCKEGYTGEKCDRCQLGYKDYPTCVSCGCNPVGSASDEPCTGPCVCKENVEGKACDRCKPGFYNLKEKNPRGCSECFCFGVSDVCSSLSWPVGQVNSMSGWLVTDLISPRKIPSQQDALGGRHQVSINNTAVMQRLAPKYYWAAPEAYLGNKLTAFGGFLKYTVSYDIPVETVDSNLMSHADVIIKGNGLTLSTQAEGLSLQPYEEYLNVVRLVPENFQDFHSKRQIDRDQLMTVLANVTHLLIRANYNSAKMALYRLESVSLDIASSNAIDLVVAADVEHCECPQGYTGTSCESCLSGYYRVDGILFGGICQPCECHGHAAECNVHGVCIACAHNTTGVHCEQCLPGFYGEPSRGTPGDCQPCACPLTIASNNFSPTCHLNDGDEVVCDWCAPGYSGAWCERCADGYYGNPTVPGESCVPCDCSGNVDPSEAGHCDSVTGECLKCLGNTDGAHCERCADGFYGDAVTAKNCRACECHVKGSHSAVCHLETGLCDCKPNVTGQQCDQCLHGYYGLDSGHGCRPCNCSVAGSVSDGCTDEGQCHCVPGVAGKRCDRCAHGFYAYQDGSCTPCDCPHTQNTCDPETGECVCPPHTQGVKCEECEDGHWGYDAEVGCQACNCSLVGSTHHRCDVVTGHCQCKSKFGGRACDQCSLGYRDFPDCVPCDCDLRGTSGDACNLEQGLCGCVEETGACPCKENVFGPQCNECREGTFALRADNPLGCSPCFCSGLSHLCSELEDYVRTPVTLGSDQPLLRVVSQSNLRGTTEGVYYQAPDFLLDAATVRQHIRAEPFYWRLPQQFQGDQLMAYGGKLKYSVAFYSLDGVGTSNFEPQVLIKGGRIRKQVIYMDAPAPENGVRQEQEVAMRENFWKYFNSVSEKPVTREDFMSVLSDIEYILIKASYGQGLQQSRISDISMEVGRKAEKLHPEEEVASLLENCVCPPGTVGFSCQDCAPGYHRGKLPAGSDRGPRPLVAPCVPCSCNNHSDTCDPNTGKCLNCGDNTAGDHCDVCTSGYYGKVTGSASDCALCACPHSPPASFSPTCVLEGDHDFRCDACLLGYEGKHCERCSSSYYGNPQTPGGSCQKCDCNPHGSVHGDCDRTSGQCVCRLGASGLRCDECEPRHILMETDCVSCDDECVGVLLNDLDEIGDAVLSLNLTGIIPVPYGILSNLENTTKYLQESLLKENMQKDLGKIKLEGVAEETDNLQKKLTRMLASTQKVNRATERIFKESQDLAIAIERLQMSITEIMEKTTLNQTLDEDFLLPNSTLQNMQQNGTSLLEIMQIRDFTQLHQNATLELKAAEDLLSQIQENYQKPLEELEVLKEAASHVLSKHNNELKAAEALVREAEAKMQESNHLLLMVNANLREFSDKKLHVQEEQNLTSELIVQGRGLIDAAAAQTDAVQDALEHLEDHQDKLLLWSAKIRHHIDDLVMHMSQRNAVDLVYRAEDHAAEFQRLADVLYSGLENIRNVSLNATSAAYVHYNIQSLIEESEELARDAHRTVTETSLLSESLVSNGKAAVQRSSRFLKEGNNLSRKLPGIALELSELRNKTNRFQENAVEITRQTNESLLILRAIPKGIRDKGAKTKELATSASQSAVSTLRDVAGLSQELLNTSASLSRVNTTLRETHQLLQDSTMATLLAGRKVKDVEIQANLLFDRLKPLKMLEENLSRNLSEIKLLISQARKQAASIKVAVSADRDCIRAYQPQISSTNYNTLTLNVKTQEPDNLLFYLGSSTASDFLAVEMRRGRVAFLWDLGSGSTRLEFPDFPIDDNRWHSIHVARFGNIGSLSVKEMSSNQKSPTKTSKSPGTANVLDVNNSTLMFVGGLGGQIKKSPAVKVTHFKGCLGEAFLNGKSIGLWNYIEREGKCRGCFGSSQNEDPSFHFDGSGYSVVEKSLPATVTQIIMLFNTFSPNGLLLYLGSYGTKDFLSIELFRGRVKVMTDLGSGPITLLTDRRYNNGTWYKIAFQRNRKQGVLAVIDAYNTSNKETKQGETPGASSDLNRLDKDPIYVGGLPRSRVVRRGVTTKSFVGCIKNLEISRSTFDLLRNSYGVRKGCLLEPIRSVSFLKGGYIELPPKSLSPESEWLVTFATTNSSGIILAALGGDVEKRGDREEAHVPFFSVMLIGGNIEVHVNPGDGTGLRKALLHAPTGTCSDGQAHSISLVRNRRIITVQLDENNPVEMKLGTLVESRTINVSNLYVGGIPEGEGTSLLTMRRSFHGCIKNLIFNLELLDFNSAVGHEQVDLDTCWLSERPKLAPDAEDSKLLPEPRAFPEQCVVDAALEYVPGAHQFGLTQNSHFILPFNQSAVRKKLSVELSIRTFASSGLIYYMAHQNQADYAVLQLHGGRLHFMFDLGKGRTKVSHPALLSDGKWHTVKTDYVKRKGFITVDGRESPMVTVVGDGTMLDVEGLFYLGGLPSQYQARKIGNITHSIPACIGDVTVNSKQLDKDSPVSAFTVNRCYAVAQEGTYFDGSGYAALVKEGYKVQSDVNITLEFRTSSQNGVLLGISTAKVDAIGLELVDGKVLFHVNNGAGRITAAYEPKTATVLCDGKWHTLQANKSKHRITLIVDGNAVGAESPHTQSTSVDTNNPIYVGGYPAGVKQKCLRSQTSFRGCLRKLALIKSPQVQSFDFSRAFELHGVFLHSCPGTES

SEQ ID NO: 241 - protein, 2948 aa, Homo sapiens
MGNENSTSDNQRTLSAQTPRSAQPPGNSQNIKRKQQDTPGSPDHRDASSIGSVGLGGFCTASESSASLDPCLVSPEVTEPRKDPQGARGPEGSLLPSPPPSQEREHPSSSMPFAECPPEGCLASPAAAPEDGPQTQSPRREPAPNAPGDIAAAFPAERDSSTPYQEIAAVPSAGRERQPKEEGQKSSFSFSSGIDQSPGMSPVPLREPMKAPLCGEGDQPGGFESQEKEAAGGFPPAESRQGVASVQVTPEAPAAAQQGTESSAVLEKSPLKPMAPIPQDPAPRASDRERGQGEAPPQYLTDDLEFLRACHLPRSNSGAAPEAEVNAASQESCQQPVGAYLPHAELPWGLPSPALVPEAGGSGKEALDTIDVQGHPQTGMRGTKPNQVVCVAAGGQPEGGLPVSPEPSLLTPTEEAHPASSLASFPAAQIPIAVEEPGSSSRESVSKAGMPVSADAAKEVVDAGLVGLERQVSDLGSKGEHPEGDPGEVPAPSPQERGEHLNTEQSHEVQPGVPPPPLPKEQSHEVQPGAPPPPLPKAPSESARGPPGPTDGAKVHEDSTSPAVAKEGSRSPGDSPGGKEEAPEPPDGGDPGNLQGEDSQAFSSKRDPEVGKDELSKPSSDAESRDHPSSHSAQPPRKGGAGHTDGPHSQTAEADASGLPHKLGEEDPVLPPVPDGAGEPTVPEGAIWEGSGLQPKCPDTLQSREGLGRMESFLTLESEKSDFPPTPVAEVAPKAQEGESTLEIRKMGSCDGEGLLTSPDQPRGPACDASRQEFHAGVPHPPQGENLAADLGLTALILDQDQQGIPSCPGEGWIRGAASEWPLLSSEKHLQPSQAQPETSIFDVLKEQAQPPENGKETSPSHPGFKDQGADSSQIHVPVEPQEDNNLPTHGGQEQALGSELQSQLPKGTLSDTPTSSPTDMVWESSLTEESELSAPTRQKLPALGEKRPEGACGDGQSSRVSPPAADVLKDFSLAGNFSRKETCCTGQGPNKSQQALADALEEGSQHEEACQRHPGASEAADGCSPLWGLSKREMASGNTGEAPPCQPDSVALLDAVPCLPALAPASPGVTPTQDAPETEACDETQEGRQQPVPAPQQKMECWATSDAESPKLLASFPSAGEQGGEAGAAETGGSAGAGDPGKQQAPEKPGEATLSCGLLQTEHCLTSGEEASTSALRESCQAEHPMASCQDALLPARELGGIPRSTMDFSTHQAVPDPKELLLSGPPEVAAPDTPYLHVDSAAQRGAEDSGVKAVSSADPRAPGESPCPVGEPPLALENAASLKLFAGSLAPLLQPGAAGGEIPAVQASSGSPKARTTEGPVDSMPCLDRMPLLAKGKQATGEEKAATAPGAGAKASGEGMAGDAAGETEGSMERMGEPSQDPKQGTSGGVDTSSEQIATLTGFPDFREHIAKIFEKPVLGALATPGEKAGAGRSAVGKDLTRPLGPEKLLDGPPGVDVTLLPAPPARLQVEKKQQLAGEAEISHLALQDPASDKLLGPAGLTWERNLPGAGVGKEMAGVPPTLREDERPEGPGAAWPGLEGQAYSQLERSRQELASGLPSPAATQELPVERAAAFQVAPHSHGEEAVAQDRIPSGKQHQETSACDSPHGEDGPGDFAHTGVPGHVPRSTCAPSPQREVLTVPEANSEPWTLDTLGGERRPGVTAGILEMRNALGNQSTPAPPTGEVADTPLEPGKVAGAAGEAEGDITLSTAETQACASGDLPEAGTTRTFSVVAGDLVLPGSCQDPACSDKAPGMEGTAALHGDSPARPQQAKEQPGPERPIPAGDGKVCVSSPPEPDETHDPKLQHLAPEELHTDRESPRPGPSMLPSVPKKDAPRVMDKVTSDETRGAEGTESSPVADDIIQPAAPADLESPTLAASSYHGDVVGQVSTDLIAQSISPAAAHAGLPPSAAEHIVSPSAPAGDRVEASTPSCPDPAKDLSRSSDSEEAFETPESTTPVKAPPAPPPPPPEVIPEPEVSTQPPPEEPGCGSETVPVPDGPRSDSVEGSPFRPPSHSFSAVFDEDKPIASSGTYNLDFDNIELVDTFQTLEPRASDAKNQEGKVNTRRKSTDSVPISKSTLSRSLSLQASDFDGASSSGNPEAVALAPDAYSTGSSSASSTLKRTKKPRPPSLKKKQTTKKPTETPPVKETQQEPDEESLVPSGENLASETKTESAKTEGPSPALLEETPLEPAVGPKAACPLDSESAEGVVPPASGGGRVQNSPPVGRKTLPLTTAPEAGEVTPSDSGGQEDSPAKGLSVRLEFDYSEDKSSWDNQQENPPPTKKIGKKPVAKMPLRRPKMKKTPEKLDNTPASPPRSPAEPNDIPIAKGTYTFDIDKWDDPNFNPFSSTSKMQESPKLPQQSYNFDPDTCDESVDPFKTSSKTPSSPSKSPASFEIPASAMEANGVDGDGLNKPAKKKKTPLKTDTFRVKKSPKRSPLSDPPSQDPTPAATPETPPVISAVVHATDEEKLAVTNQKWTCMTVDLEADKQDYPQPSDLSTFVNETKFSSPTEELDYRNSYEIEYMEKIGSSLPQDDDAPKKQALYLMFDTSQESPVKSSPVRMSESPTPCSGSSFEETEALVNTAAKNQHPVPRGLAPNQESHLQVPEKSSQKELEAMGLGTPSEAIEITAPEGSFASADALLSRLAHPVSLCGALDYLEPDLAEKNPPLFAQKLQEELEFAIMRIEALKLARQIALASRSHQDAKREAAHPTDVSISKTALYSRIGTAEVEKPAGLLFQQPDLDSALQIARAEIITKEREVSEWKDKYEESRREVMEMRKIVAEYEKTIAQMIEDEQREKSVSHQTVQQLVLEKEQALADLNSVEKSLADLFRRYEKMKEVLEGFRKNEEVLKRCAQEYLSRVKKEEQRYQALKVHAEEKLDRANAEIAQVRGKAQQEQAAHQASLRKEQLRVDALERTLEQKNKEIEELTKICDELIAKMGKS

SEQ ID NO: 242 - protein, 1466 aa, Homo sapiens
MMSFVQKGSWLLLALLHPTIILAQQEAVEGGCSHLGQSYADRDVWKPEPCQICVCDSGSVLCDDIICDDQELDCPNPEIPFGECCAVCPQPPTAPTRPPNGQGPQGPKGDPGPPGIPGRNGDPGIPGQPGSPGSPGPPGICESCPTGPQNYSPQYDSYDVKSGVAVGGLAGYPGPAGPPGPPGPPGTSGHPGSPGSPGYQGPPGEPGQAGPSGPPGPPGAIGPSGPAGKDGESGRPGRPGERGLPGPPGIKGPAGIPGFPGMKGHRGFDGRNGEKGETGAPGLKGENGLPGENGAPGPMGPRGAPGERGRPGLPGAAGARGNDGARGSDGQPGPPGPPGTAGFPGSPGAKGEVGPAGSPGSNGAPGQRGEPGPQGHAGAQGPPGPPGINGSPGGKGEMGPAGIPGAPGLMGARGPPGPAGANGAPGLRGGAGEPGKNGAKGEPGPRGERGEAGIPGVPGAKGEDGKDGSPGEPGANGLPGAAGERGAPGFRGPAGPNGIPGEKGPAGERGAPGPAGPRGAAGEPGRDGVPGGPGMRGMPGSPGGPGSDGKPGPPGSQGESGRPGPPGPSGPRGQPGVMGFPGPKGNDGAPGKNGERGGPGGPGPQGPPGKNGETGPQGPPGPTGPGGDKGDTGPPGPQGLQGLPGTGGPPGENGKPGEPGPKGDAGAPGAPGGKGDAGAPGERGPPGLAGAPGLRGGAGPPGPEGGKGAAGPPGPPGAAGTPGLQGMPGERGGLGSPGPKGDKGEPGGPGADGVPGKDGPRGPTGPIGPPGPAGQPGDKGEGGAPGLPGIAGPRGSPGERGETGPPGPAGFPGAPGQNGEPGGKGERGAPGEKGEGGPPGVAGPPGGSGPAGPPGPQGVKGERGSPGGPGAAGFPGARGLPGPPGSNGNPGPPGPSGSPGKDGPPGPAGNTGAPGSPGVSGPKGDAGQPGEKGSPGAQGPPGAPGPLGIAGITGARGLAGPPGMPGPRGSPGPQGVKGESGKPGANGLSGERGPPGPQGLPGLAGTAGEPGRDGNPGSDGLPGRDGSPGGKGDRGENGSPGAPGAPGHPGPPGPVGPAGKSGDRGESGPAGPAGAPGPAGSRGAPGPQGPRGDKGETGERGAAGIKGHRGFPGNPGAPGSPGPAGQQGAIGSPGPAGPRGPVGPSGPPGKDGTSGHPGPIGPPGPRGNRGERGSEGSPGHPGQPGPPGPPGAPGPCCGGVGAAAIAGIGGEKAGGFAPYYGDEPMDFKINTDEIMTSLKSVNGQIESLISPDGSRKNPARNCRDLKFCHPELKSGEYWVDPNQGCKLDAIKVFCNMETGETCISANPLNVPRKHWWTDSSAEKKHVWFGESMDGGFQFSYGNPELPEDVLDVQLAFLRLLSSRASQNITYHCKNSIAYMDQASGNVKKALKLMGSNEGEFKAEGNSKFTYTVLEDGCTKHTGEWSKTVFEYRTRKAVRLPIVDIAPYDIGGPDQEFGVDVGPVCFL

SEQ ID NO: 243 - protein, 2007 aa, Homo sapiens
MAQRTGLEDPERYLFVDRAVIYNPATQADWTAKKLVWIPSERHGFEAASIKEERGDEVMVELAENGKKAMVNKDDIQKMNPPKFSKVEDMAELTCLNEASVLHNLKDRYYSGLIYTYSGLFCVVINPYKNLPIYSENIIEMYRGKKRHEMPPHIYAISESAYRCMLQDREDQSILCTGESGAGKTENTKKVIQYLAHVASSHKGRKDHNIPQESPKPVKHQGELERQLLQANPILESFGNAKTVKNDNSSRFGKFIRINFDVTGYIVGANIETYLLEKSRAVRQAKDERTFHIFYQLLSGAGEHLKSDLLLEGFNNYRFLSNGYIPIPGQQDKDNFQETMEAMHIMGFSHEEILSMLKVVSSVLQFGNISFKKERNTDQASMPENTVAQKLCHLLGMNVMEFTRAILTPRIKVGRDYVQKAQTKEQADFAVEALAKATYERLFRWLVHRINKALDRTKRQGASFIGILDIAGFEIFELNSFEQLCINYTNEKLQQLFNHTMFILEQEEYQREGIEWNFIDFGLDLQPCIDLIERPANPPGVLALLDEECWFPKATDKTFVEKLVQEQGSHSKFQKPRQLKDKADFCIIHYAGKVDYKADEWLMKNMDPLNDNVATLLHQSSDRFVAELWKDEIQNIQRASFYDSVSGLHEPPVDRIVGLDQVTGMTETAFGSAYKTKKGMFRTVGQLYKESLTKLMATLRNTNPNFVRCIIPNHEKRAGKLDPHLVLDQLRCNGVLEGIRICRQGFPNRIVFQEFRQRYEILTPNAIPKGFMDGKQACERMIRALELDPNLYRIGQSKIFFRAGVLAHLEEERDLKITDIIIFFQAVCRGYLARKAFAKKQQQLSALKVLQRNCAAYLKLRHWQWWRVFTKVKPLLQVTRQEEELQAKDEELLKVKEKQTKVEGELEEMERKHQQLLEEKNILAEQLQAETELFAEAEEMRARLAAKKQELEEILHDLESRVEEEEERNQILQNEKKKMQAHIQDLEEQLDEEEGARQKLQLEKVTAEAKIKKMEEEILLLEDQNSKFIKEKKLMEDRIAECSSQLAEEEEKAKNLAKIRNKQEVMISDLEERLKKEEKTRQELEKAKRKLDGETTDLQDQIAELQAQIDELKLQLAKKEEELQGALARGDDETLHKNNALKVVRELQAQIAELQEDFESEKASRNKAEKQKRDLSEELEALKTELEDTLDTTAAQQELRTKREQEVAELKKALEEETKNHEAQIQDMRQRHATALEELSEQLEQAKRFKANLEKNKQGLETDNKELACEVKVLQQVKAESEHKRKKLDAQVQELHAKVSEGDRLRVELAEKASKLQNELDNVSTLLEEAEKKGIKFAKDAASLESQLQDTQELLQEETRQKLNLSSRIRQLEEEKNSLQEQQEEEEEARKNLEKQVLALQSQLADTKKKVDDDLGTIESLEEAKKKLLKDAEALSQRLEEKALAYDKLEKTKNRLQQELDDLTVDLDHQRQVASNLEKKQKKFDQLLAEEKSISARYAEERDRAEAEAREKETKALSLARALEEALEAKEEFERQNKQLRADMEDLMSSKDDVGKNVHELEKSKRALEQQVEEMRTQLEELEDELQATEDAKLRLEVNMQAMKAQFERDLQTRDEQNEEKKRLLIKQVRELEAELEDERKQRALAVASKKKMEIDLKDLEAQIEAANKARDEVIKQLRKLQAQMKDYQRELEEARASRDEIFAQSKESEKKLKSLEAEILQLQEELASSERARRHAEQERDELADEITNSASGKSALLDEKRRLEARIAQLEEELEEEQSNMELLNDRFRKTTLQVDTLNAELAAERSAAQKSDNARQQLERQNKELKAKLQELEGAVKSKFKATISALEAKIGQLEEQLEQEAKERAAANKLVRRTEKKLKEIFMQVEDERRHADQYKEQMEKANARMKQLKRQLEEAEEEATRANASRRKLQRELDDATEANEGLSREVSTLKNRLRRGGPISFSSSRSGRRQLHLEGASLELSDDDTESKTSDVNETQPPQSE

SEQ ID NO: 244 - protein, 2320 aa, Homo sapiens
MAEPSSARRPVPLIESELYFLIARYLSAGPCRRAAQVLVQELEQYQLLPKRLDWEGNEHNRSYEELVLSNKHVAPDHLLQICQRIGPMLDKEIPPSISRVTSLLGAGRQSLLRTAKDCRHTVWKGSAFAALHRGRPPEMPVNYGSPPNLVEIHRGKQLTGCSTFSTAFPGTMYQHIKMHRRILGHLSAVYCVAFDRTGHRIFTGSDDCLVKIWSTHNGRLLSTLRGHSAEISDMAVNYENTMIAAGSCDKIIRVWCLRTCAPVAVLQGHTGSITSLQFSPMAKGSQRYMVSTGADGTVCFWQWDLESLKFSPRPLKFTEKPRPGVQMLCSSFSVGGMFLATGSTDHVIRMYFLGFEAPEKIAELESHTDKVDSIQFCNNGDRFLSGSRDGTARIWRFEQLEWRSILLDMATRISGDLSSEEERFMKPKVTMIAWNQNDSIVVTAVNDHVLKVWNSYTGQLLHNLMGHADEVFVLETHPFDSRIMLSAGHDGSIFIWDITKGTKMKHYFNMIEGQGHGAVFDCKFSQDGQHFACTDSHGHLLIFGFGCSKPYEKIPDQMFFHTDYRPLIRDSNNYVLDEQTQQAPHLMPPPFLVDVDGNPHPTKYQRLVPGRENSADEHLIPQLGYVATSDGEVIEQIISLQTNDNDERSPESSILDGMIRQLQQQQDQRMGADQDTIPRGLSNGEETPRRGFRRLSLDIQSPPNIGLRRSGQVEGVRQMHQNAPRSQIATERDLQAWKRRVVVPEVPLGIFRKLEDFRLEKGEEERNLYIIGRKRKTLQLSHKSDSVVLVSQSRQRTCRRKYPNYGRRNRSWRELSSGNESSSSVRHETSCDQSEGSGSSEEDEWRSDRKSESYSESSSDSSSRYSDWTADAGINLQPPLRTSCRRRITRFCSSSEDEISTENLSPPKRRRKRKKENKPKKENLRRMTPAELANMEHLYEFHPPVWITDTTLRKSPFVPQMGDEVIYFRQGHEAYIEAVRRNNIYELNPNKEPWRKMDLRDQELVKIVGIRYEVGPPTLCCLKLAFIDPATGKLMDKSFSIRYHDMPDVIDFLVLRQFYDEARQRNWQSCDRFRSIIDDAWWFGTVLSQEPYQPQYPDSHFQCYIVRWDNTEIEKLSPWDMEPIPDNVDPPEELGASISVTTDELEKLLYKPQAGEWGQKSRDEECDRIISGIDQLLNLDIAAAFAGPVDLCTYPKYCTVVAYPTDLYTIRMRLVNRFYRRLSALVWEVRYIEHNARTFNEPESVIARSAKKITDQLLKFIKNQHCTNISELSNTSENDEQNAEDLDDSDLPKTSSGRRRVHDGKKSIRATNYVESNWKKQCKELVNLIFQCEDSEPFRQPVDLVEYPDYRDIIDTPMDFGTVRETLDAGNYDSPLEFCKDIRLIFSNAKAYTPNKRSKIYSMTLRLSALFEEKMKKISSDFKIGQKFNEKLRRSQRFKQRQNCKGDSQPNKSIRNLKPKRLKSQTKIIPELVGSPTQSTSSRTAYLGTHKTSAGISSGVTSGDSSDSAESSERRKRNRPITNGSTLSESEVEDSLATSLSSSASSSSEESKESSRARESSSRSGLSRSSNLRVTRTRAAQRKTGPVSLANGCGRKATRKRVYLSDSDNNSLETGEILKARAGNNRKVLRKCAAVAANKIKLMSDVEENSSSESVCSGRKLPHRNASAVARKKLLHNSEDEQSLKSEIEEEELKDENQLLPVSSSHTAQSNVDESENRDSESESDLRVARKNWHANGYKSHTPAPSKTKFLKIESSEEDSKSHDSDHACNRTAGPSTSVQKLKAESISEEADSEPGRSGGRKYNTFHKNASFFKKTKILSDSEDSESEEQDREDGKCHKMEMNPISGNLNCDPIAMSQCSSDHGCETDLDSDDDKIEKPNNFMKDSASQDNGLSRKISRKRVCSSDSDSSLQVVKKSSKARTGLLRITRRCAATAANKIKLMSDVEDVSLENVHTRSKNGRKKPLHLACTTAKKKLSDCEGSVHCEVPSEQYACEGKPPDPDSEGSTKVLSQALNGDSDSEDMLNSEHKHRHTNIHKIDAPSKRKSSSVTSSGEDSKSHIPGSETDRTFSSESTLAQKATAENNFEVELNYGLRRWNGRRLRTYGKAPFSKTKVIHDSQETAEKEVKRKRSHPELENVKISETTGNSKFRPDTSSKSSDLGSVTESDIDCTDNTKTKRRKTKGKAKVVRKEFVPRDREPNTKVRTCMHNQKDAVQMPSETLKAKMVPEKVPRRCATVAANKIKIMSNLKETISGPENVWIRKSSRKLPHRNASAAAKKKLLNVYKEDDTTINSESEKELEDINRKMLFLRGFRSWKENAQ

SEQ ID NO: 245 - protein, 4169 aa, Homo sapiens
MEPEDLPWPGELEEEEEEEEEEEEEEEEEAAAAAAANVDDVVVVEEVEEEAGRELDSDSHYGPQHLESIDDEEDEEAKAWLQAHPGRILPPLSPPQHRYSEGERTSLEKIVPLTCHVWQQIVYQGNSRTQISDTNVVCLETTAQRGSGDDQKTESWHCLPQEMDSSQTLDTSQTRFNVRTEDTEVTDFPSLEEGILTQSENQVKEPNRDLFCSPLLVIQDSFASPDLPLLTCLTQDQEFAPDSLFHQSELSFAPLRGIPDKSEDTEWSSRPSEVSEALFQATAEVASDLASSRFSVSQHPLIGSTAVGSQCPFLPSEQGNNEETISSVDELKIPKDCDRYDDLCSYMSWKTRKDTQWPENNLADKDQVSVATSFDITDENIATKRSDHFDAARSYGQYWTQEDSSKQAETYLTKGLQGKVESDVITLDGLNENAVVCSERVAELQRKPTRESEYHSSDLRMLRMSPDTVPKAPKHLKAGDTSKGGIAKVTQSNLKSGITTTPVDSDIGSHLSLSLEDLSQLAVSSPLETTTGQHTDTLNQKTLADTHLTEETLKVTAIPEPADQKTATPTVLSSSHSHRGKPSIFYQQGLPDSHLTEEALKVSAAPGLADQTTGMSTLTSTSYSHREKPGTFYQQELPESNLTEEPLEVSAAPGPVEQKTGIPTVSSTSHSHVEDLLFFYRQTLPDGHLTDQALKVSAVSGPADQKTGTATVLSTPHSHREKPGIFYQQEFADSHQTEETLTKVSATPGPADQKTEIPAVQSSSYSQREKPSILYPQDLADSHLPEEGLKVSAVAGPADQKTGLPTVPSSAYSHREKLLVFYQQALLDSHLPEEALKVSAVSGPADGKTGTPAVTSTSSASSSLGEKPSAFYQQTLPNSHLTEEALKVSIVPGPGDQKTGIPSAPSSFYSHREKPIIFSQQTLPDFLFPEEALKVSAVSVLAAQKTGTPTVSSNSHSHSEKSSVFYQQELPDSDLPRESLKMSAIPGLTDQKTVPTPTVPSGSFSHREKPSIFYQQEWPDSYATEKALKVSTGPGPADQKTEIPAVQSSSYPQREKPSVLYPQVLSDSHLPEESLKVSAFPGPADQMTDTPAVPSTFYSQREKPGIFYQQTLPESHLPKEALKISVAPGLADQKTGTPTVTSTSYSQHREKPSIFHQQALPGTHIPEEAQKVSAVTGPGNQKTWIPRVLSTFYSQREKPGIFYQQTLPGSHIPEEAQKVSPVLGPADQKTGTPTPTSASYSHTEKPGIFYQQVLPDNHPTEEALKISVASEPVDQTTGTPAVTSTSYSQYREKPSIFYQQSLPSSHLTEEAKNVSAVPGPADQKTVIPILPSTFYSHTEKPGVFYQQVLPHSHPTEEALKISVASEPVDQTTGTPTVTSTSYSQHTEKPSIFYQQSLPGSHLTEEAKNVSAVPGPGDRKTGIPTLPSTFYSHTEKPGSFYQQVLPHSHLPEEALEVSVAPGPVDQTIGTPTVTSPSSSFGEKPIVIYKQAFPEGHLPEESLKVSVAPGPVGQTTGAPTITSPSYSQHRAKSGSFYQLALLGSQIPEEALRVSSAPGPADQTTGIPTITSTSYSFGEKPIVNYKQAFPDGHLPEEALKVSIVSGPTEKKTDIPAGPLGSSALGEKPITFYRQALLDSPLNKEVVKVSAAPGPADQKTETLPVHSTSYSNRGKPVIFYQQTLSDSHLPEEALKVPPVPGPDAQKTETPSVSSSLYSYREKPIVFYQQALPDSELTQEALKVSAVPQPADQKTGLSTVTSSFYSHTEKPNISYQQELPDSHLTEEALKVSNVPGPADQKTGVSTVTSTSYSHREKPIVSYQRELPHFTEAGLKILRVPGPADQKTGINILPSNSYPQREHSVISYEQELPDLTEVTLKAIGVPGPADQKTGIQIASSSSYSNREKASIFHQQELPDVTEEALNVFVVPGQGDRKTEIPTVPLSYYSRREKPSVISQQELPDSHLTEEALKVSPVSIPAEQKTGIPIGLSSSYSHSHKEKLKISTVHIPDDQKTEFPAATLSSYSQIEKPKISTVIGPNDQKTPSQTAFHSSYSQTVKPNILFQQQLPDRDQSKGILKISAVPELTDVNTGKPVSLSSSYFHREKSNIFSPQELPGSHVTEDVLKVSTIPGPAGQKTVLPTALPSSFSHREKPDIFYQKDLPDRHLTEDALKISSALGQADQITGLQTVPSGTYSHGENHKLVSEHVQRLIDNLNSSDSSVSSNNVLLNSQADDRVVINKPESAGFRDVGSEEIQDAENSAKTLKEIRTLLMEAENMALKRCNFPAPLARFRDISDISFIQSKKVVCFKEPSSTGVSNGDLLHRQPFTEESPSSRCIQKDIGTQTNLKCRRGIENWEFISSTTVRSPLQEAESKVSMALEETLRQYQAAKSVMRSEPEGCSGTIGNKIIIPMMTVIKSDSSSDASDGNGSCSWDSNLPESLESVSDVLLNFFPYVSPKTSITDSREEEGVSESEDGGGSSVDSLAAHVKNLLQCESSLNHAKEILRNAEEEESRVRAHAWNMKFNLAHDCGYSISELNEDDRRKVEEIKAELFGHGRTTDLSKGLQSPRGMGCKPEAVCSHIIIESHEKGCFRTLTSEHPQLDRHPCAFRSAGPSEMTRGRQNPSSCRAKHVNLSASLDQNNSHFKVWNSLQLKSHSPFQNFIPDEFKISKGLRMPFDEKMDPWLSELVEPAFVPPKEVDFHSSSQMPSPEPMKKFTTSITFSSHRHSKCISNSSVVKVGVTEGSQCTGASVGVFNSHFTEEQNPPRDLKQKTSSPSSFKMHSNSQDKEVTILAEGRRQSQKLPVDFERSFQEEKPLERSDFTGSHSEPSTRANCSNFKEIQISDNHTLISMGRPSSTLGVNRSSSRLGVKEKNVTITPDLPSCIFLEQRELFEQSKAPRADDHVRKHHSPSPQHQDYVAPDLPSCIFLEQRELFEQCKAPYVDHQMRENHSPLPQGQDSIASDLPSPISLEQCQSKAPGVDDQMNKHHFPLPQGQDCVVEKNNQHKPKSHISNINVEAKFNTVVSQSAPNHCTLAASASTPPSNRKALSCVHITLCPKTSSKLDSGTLDERFHSLDAASKARMNSEFNFDLHTVSSRSLEPTSKLLTSKPVAQDQESLGFLGPKSSLDFQVVQPSLPDSNTITQDLKTIPSQNSQIVTSRQIQVNISDFEGHSNPEGTPVFADRLPEKMKTPLSAFSEKLSSDAVTQITTESPEKTLFSSEIFINAEDRGHEIIEPGNQKLRKAPVKFASSSSVQQVTFSRGTDGQPLLLPYKPSGSTKMYYVPQLRQIPPSPDSKSDTTVESSHSGSNDAIAPDFPAQVLGTRDDDLSATVNIKHKEGIYSKRVVTKASLPVGEKPLQNENADASVQVLITGDENLSDKKQQEIHSTRAVTEAAQAKEKESLQKDTADSSAAAAAEHSAQVGDPEMKNLPDTKAITQKEEIHRKKTVPEEAWPNNKESLQINIEESECHSEFENTTRSVFRSAKFYIHHPVHLPSDQDICHESLGKSVFMRHSWKDFFQHHPDKHREHMCLPLPYQNMDKTKTDYTRIKSLSINVNLGNKEVMDTTKSQVRDYPKHNGQISDPQRDQKVTPEQTTQHTVSLNELWNKYRERQRQQRQPELGDRKELSLVDRLDRLAKILQNPITHSLQVSESTHDDSRGERSVKEWSGRQQQRNKLQKKKRFKSLEKSHKNTGELKKSKVLSHHRAGRSNQIKIEQIKFDKYILSKQPGFNYISNTSSDCRPSEESELLTDTTTNILSGTTSTVESDILTQTDREVALHERSSSVSTIDTARLIQAFGHERVCLSPRRIKLYSSITNQQRRYLEKRSKHSKKVLNTGHPLVTSEHTRRRHIQVANHVISSDSISSSASSFLSSNSTFCNKQNVHMLNKGIQAGNLEIVNGAKKHTRDVGITFPTPSSSEAKLEENSDVTSWSEEKREEKMLFTGYPEDRKLKKNKKNSHEGVSWFVPVENVESRSKKENVPNTCGPGISWFEPITKTRPWREPLREQNCQGQHLDGRGYLAGPGREAGRDLLRPFVRATLQESLQFHRPDFISRSGERIKRLKLIVQERKLQSMLQTERDALFNIDRERQGHQNRMCPLPKRVFLAIQKNKPISKKEMIQRSKRIYEQLPEVQKKREEEKRKSEYKSYRLRAQLYKKRVTNQLLGRKVPWD

SEQ ID NO: 246 - protein, 5090 aa, Homo sapiens
MSGHTLPPLPVPGTNSTEQASVPRAMAATLGAGTPPRPQARSIAGVYVEASGQAQSVYAAMEQGLLPAGLGQALLEAQAATGGLVDLARGQLLPVSKALQQGLVGLELKEKLLAAERATTGYPDPYGGEKLALFQAIGKEVVDRALGQSWLEVQLATGGLVDPAQGVLVAPEPACHQGLLDRETWHKLSELEPGTGDLRFLNPNTLERLTYHQLLERCVRAPGSGLALLPLKITFRSMGGAVSAAELLEVGILDEQAVQGLREGRLAAVDVSARAEVRRYLEGTGSVAGVVLLPEGHKKSFFQAATEHLLPMGTALPLLEAQAATHTLVDPITGQRLWVDEAVRAGLVSPELHEQLLVAEQAVTGHHDPFSGSQIPLFQAMKKGLVDRPLALRLLDAQLATGGLVCPARRLRLPLEAALRCGCLDEDTQRQLSQAGSFSDGTHGGLRYEQLLALCVTDPETGLAFLPLSGGPRGGEPQGPPFIKYSTRQALSTATATVSVGKFRGRPVSLWELLFSEAISSEQRAMLAQQYQEGTLSVEKLAAELSATLEQAAATARVTFSGLRDTVTPGELLKAEIIDQDLYERLEHGQATAKDVGSLASAQRYLQGTGCIAGLLLPGSQERLSIYEARCKGLLRPGTALILLEAQAATGFIIDPKANKGHSVEEALRAAVIGPDVFAKLLSAERAVTGYTDPYTGQQISLFQAMQKGLIVREHGIRLLEAQIATGGVIDPVHSHRVPVDVAYRRGYFDQMLNLILLDPSDDTKGFFDPNTHENLTYLQLLERCVRDPETGLYLLPLSSTQSPLVDSATQQAFQNLLLSVKYGRFQGQRVSAWELINSEYFSEGRRRQLLRRYRQREVTLGQVAKLLEAETQRQADIMLPALRSRVTVHQLLEAGIIDQQLLDQVLAGTISPEALLLMDGVRRYLCGLGAVGGVRLLPSGQRLSLYQAMRQKLLGPRVALALLEAQAATGTIMDPHSPESLSVDEAVRRGVVGPELYGRLKRAEGAIAGFRDPFSGKQVSVFQAMKKGLIPWEQAARLLEAQVATGGIIDPTSHHHLPMPVAIQRGYVDQEMETALSSSSETFPTPDGQGRTSYAQLLEECPRDETSGLHLLPLPESAPALPTEEQVQRSLQAVPGAKDGTSLWDLLSSCHFTEEQRRGLLEDVQEGRTTVPQLLASVQRWVQETKLLAQARVMVPGPRGEVPAVWLLDAGIITQETLEALAQGTQSPAQVAEQPAVKACLWGTGCVAGVLLQPSGAKASIAQAVRDGLLPTGLGQRLLEAQVASGFLVDPLNNQRLSVEDAVKVGLVGRELSEQLGQAERAAAGYPDPYSRASLSLWQAMEKGLVPQNEGLPLLQVQLATGGVVDPVHGVHLPQAAACRLGLLDTQTSQVLTAVDKDNKFFFDPSARDQVTYQQLRERCVCDSETGLLLLPLPSDTVLEVDDHTAVALRAMKVPVSTGRFKGCSVSLWDLLLSEYVGADKRRELVALCRSGRAAALRQVVSAVTALVEAAERQPLQATFRGLRKQVSARDLFRAQLISRKTLDELSQGTTTVKEVAEMDSVKRSLEGGNFIAGVLIQGTQERMSIPEALRRHILRPGTALVLLEAQAATGFIIDPAENRKLTVEEAFKAGMFGKETYVKLLSAERAVTGYTDPYTGQQISLFQAMQKDLIVREHGIRLLEAQIATGGIIDPVHSHRVPVDVAYRCGYFDEEMNRILADPSDDTKGFFDPNTHENLTYLQLLERCVEDPETGLYLLQIIKKGENYVYINEATRHVLQSRTAKMRVGRFADQVVSFWDLLSSPYFTEDRKRELIQEYGAQSGGLEKLLEIITTTIEETETQNQGIKVAAIRGEVTAADLFNSRVIDQKTLHTLRVGRTGGQALSTLECVKPYLEGSDCIAGVTVPSTREVMSLHEASRKELIPAAFATWLLEAQAATGFLLDPCTRQKLSVDEAVDVGLVNEELRERLLKAERAATGYRDPATGDTIPLFQAMQKQLIEKAEALRLLEVQVATGGVIDPQHHHRLPLETAYRRGCLHKDIYALISDQKHMRKRFVDPNTQEKVSYRELQERCRPQEDTGWVLFPVNKAARDSEHIDDETRRALEAEQVEITVGRFRGQKPTLWALLNSEYVTEEKKLQLVRMYRTHTRRALQTVAQLILELIEKQETSNKHLWFQGIRRQITASELLSSAIITEEMLQDLETGRSTTQELMEDDRVKRYLEGTSCIAGVLVPAKDQPGRQEKMSIYQAMWKGVLRPGTALVLLEAQAATGFVIDPVRNLRLSVEEPVPAGVVGSEIQEKLLSAERAVTGYTDPYTGQQISLFQAMQKDLIVREHGIRLLEAQIATGGVIDPVHSHRVPVDVAYRRGYFDEEMNRVLADPSDDTKGFFDPNTHENLTYVQLLRRCVPDPDTGLYMLQLAGRGSAVHQLSEELRCALRDARVTPGSGALQGQSVSVWELLFYREVSEDRRQDLLSRYRAGTLTVEELGATLTSLLAQAQAQARAEAEAGSPRPDPREALRAATMEVKVGRLRGRAVPVWDVLASGYVSRAAREELLAEFGSGTLDLPALTRRLTAIIEEAEEAPGARPQLQDARRGPREPGPAGRGDGDSGRSQREGQGEGETQEAAAAAAAARRQEQTLRDATMEVQRGQFQGRPVSVWDVLFSSYLSEARRDELLAQHAAGALGLPDLVAVLTRVIEETEERLSKVSFRGLRRQVSASELHTSGILGPETLRDLAQGTKTLQEVTEMDSVKRYLEGTSCIAGVLVPAKDQPGRQEKMSIYQAMWKGVLRPGTALVLLEAQAATGFVIDPVRNLRLSVEEAVAAGVVGGEIQEKLLSAERAVTGYTDPYTGQQISLFQAMQKDLIVREHGIRLLEAQIATGGVIDPVHSHRVPVDVAYRRGYFDEEMNRVLADPSDDTKGFFDPNTHENLTYVQLLRRCVPDPDTGLYMLQLAGRGSAVHQLSEELRCALRDARVTPGSGALQGQSVSVWELLFYREVSEDRRQDLLSRYRAGTLTVEELGATLTSLLAQAQAQARAEAEAGSPRPDPREALRAATMEVKVGRLRGRAVPVWDVLASGYVSGAAREELLAEFGSGTLDLPALTRRLTAIIEEAEEAPGARPQLQDAWRGPREPGPAGRGDGDSGRSQREGQGEGETQEAAAAAAAARRQEQTLRDATMEVQRGQFQGRPVSVWDVLFSSYLSEARRDELLAQHAAGALGLPDLVAVLTRVIEETEERLSKVSFRGLRRQVSASELHTSGILGPETLRDLAQGTKTLQEVTEMDSVKRYLEGTSCIAGVLVPAKDQPGRQEKMSIYQAMWKGVLRPGTALVLLEAQAATGFVIDPVRNLRLSVEEAVAAGVVGGEIQEKLLSAERAVTGYTDPYTGQQISLFQAMQKDLIVREHGIRLLEAQIATGGVIDPVHSHRVPVDVAYRRGYFDEEMNRVLADPSDDTKGFFDPNTHENLTYVQLLRRCVPDPDTGLYMLQLAGRGSAVHQLSEELRCALRDARVTPGSGALQGQSVSVWELLFYREVSEDRRQDLLSRYRAGTLTVEELGATLTSLLAQAQAQARAEAEAGSPRPDPREALRAATMEVKVGRLRGRAVPVWDVLASGYVSGAAREELLAEFGSGTLDLPALTRRLTAIIEEAEEAPGARPQLQDAWRGPREPGPAGRGDGDSGRSQREGQGEGETQEAAAAAAAARRQEQTLRDATMEVQRGQFQGRPVSVWDVLFSSYLSEARRDELLAQHAAGALGLPDLVAVLTRVIEETEERLSKVSFRGLRRQVSASELHTSGILGPETLRDLAQGTKTLQEVTEMDSVKRYLEGTSCIAGVLVPAKDQPGRQEKMSIYQAMWKGVLRPGTALVLLEAQAATGFVIDPVRNLRLSVEEAVAAGVVGGEIQEKLLSAERAVTGYTDPYTGQQISLFQAMQKDLIVREHGIRLLEAQIATGGVIDPVHSHRVPVDVAYRRGYFDEEMNRVLADPSDDTKGFFDPNTHENLTYVQLLRRCVPDPDTGLYMLQLAGRGSAVHQLSEELRCALRDARVTPGSGALQGQSVSVWELLFYREVSEDRRQDLLSRYRASTLTVEELGATLTSLLAQAQAQARAEAEAGSPRPDPREALRAATMEVKVGRLRGRAVPVWDVLASGYVSRAAREELLAEFGSGTLDLPALTRRLTAIIEEAEEAPGARPQLQDAWRGPREPGPAGRGDGDSGRSQREGQGEGETQEAAAATAAARRQEQTLRDATMEVQRGQFQGRPVSVWDVLFSSYLSEARRDELLAQHAAGALGLPDLVAVLTRVIEETEERLSKVSFRGLRRQVSASELHTSGILGPETLRDLAQGTKTLQEVTEMDSVKRYLEGTSCIAGVLVPAKDQPGRQEKMSIYQAMWKGVLRPGTALVLLEAQAATGFVIDPVRNLRLSVEEAVAAGVVGGEIQEKLLSAERAVTGYTDPYTGQQISLFQAMQKDLIVREHGIRLLEAQIATGGVIDPVHSHRVPVDVAYRRGYFDEEMNRVLADPSDDTKGFFDPNTHENLTYVQLLRRCVPDPDTGLYMLQLAGRGSAVHQLSEELRCALRDARVTPGSGALQGQSVSVWELLFYREVSEDRRQDLLSRYRAGTLTVEELGATLTSLLAQAQAQARAEAEAGSPRPDPREALRAATMEVKVGRLRGRAVPVWDVLASGYVSGAAREELLAEFGSGTLDLPALTRRLTAIIEEAEEAPGARPQLQDAWRGPREPGPAGRGDGDSGRSQREGQGEGETQEAAAAAAAARRQEQTLRDATMEVQRGQFQGRPVSVWDVLFSSYLSEARRDELLAQHAAGALGLPDLVAVLTRVIEETEERLSKVSFRGLRRQVSASELHTSGILGPETLRDLAQGTKTLQEVTEMDSVKRYLEGTSCIAGVLVPAKDQPGRQEKMSIYQAMWKGVLRPGTALVLLEAQAATGFVIDPVRNLRLSVEEAVAAGVVGGEIQEKLLSAERAVTGYTDPYTGQQISLFQAMQKDLIVREHGIRLLEAQIATGGVIDPVHSHRVPVDVAYRRGYFDEEMNRVLADPSDDTKGFFDPNTHENLTYLQLLQRATLDPETGLLFLSLSLQ

SEQ ID NO: 247 - protein, 2671 aa, Homo sapiens
MSEMSSFLHIGDIVSLYAEGSVNGFISTLGLVDDRCVVEPAAGDLDNPPKKFRDCLFKVCPMNRYSAQKQYWKAKQTKQDKEKIADVVLLQKLQHAAQMEQKQNDTENKKVHGDVVKYGSVIQLLHMKSNKYLTVNKRLPALLEKNAMRVTLDATGNEGSWLFIQPFWKLRSNGDNVVVGDKVILNPVNAGQPLHASNYELSDNAGCKEVNSVNCNTSWKINLFMQFRDHLEEVLKGGDVVRLFHAEQEKFLTCDEYKGKLQVFLRTTLRQSATSATSSNALWEVEVVHHDPCRGGAGHWNGLYRFKHLATGNYLAAEENPSYKGDASDPKAAGMGAQGRTGRRNAGEKIKYCLVAVPHGNDIASLFELDPTTLQKTDSFVPRNSYVRLRHLCTNTWIQSTNVPIDIEEERPIRLMLGTCPTKEDKEAFAIVSVPVSEIRDLDFANDASSMLASAVEKLNEGFISQNDRRFVIQLLEDLVFFVSDVPNNGQNVLDIMVTKPNRERQKLMREQNILKQVFGILKAPFREKGGEGPLVRLEELSDQKNAPYQHMFRLCYRVLRHSQEDYRKNQEHIAKQFGMMQSQIGYDILAEDTITALLHNNRKLLEKHITKTEVETFVSLVRKNREPRFLDYLSDLCVSNHIAIPVTQELICKCVLDPKNSDILIRTELRPVKEMAQSHEYLSIEYSEEEVWLTWTDKNNEHHEKSVRQLAQEARAGNAHDENVLSYYRYQLKLFARMCLDRQYLAIDEISQQLGVDLIFLCMADEMLPFDLRASFCHLMLHVHVDRDPQELVTPVKFARLWTEIPTAITIKDYDSNLNASRDDKKNKFANTMEFVEDYLNNVVSEAVPFANEEKNKLTFEVVSLAHNLIYFGFYSFSELLRLTRTLLGIIDCVQGPPAMLQAYEDPGGKNVRRSIQGVGHMMSTMVLSRKQSVFSAPSLSAGASAAEPLDRSKFEENEDIVVMETKLKILEILQFILNVRLDYRISYLLSVFKKEFVEVFPMQDSGADGTAPAFDSTTANMNLDRIGEQAEAMFGVGKTSSMLEVDDEGGRMFLRVLIHLTMHDYAPLVSGALQLLFKHFSQRQEAMHTFKQVQLLISAQDVENYKVIKSELDRLRTMVEKSELWVDKKGSGKGEEVEAGAAKDKKERPTDEEGFLHPPGEKSSENYQIVKGILERLNKMCGVGEQMRKKQQRLLKNMDAHKVMLDLLQIPYDKGDAKMMEILRYTHQFLQKFCAGNPGNQALLHKHLHLFLTPGLLEAETMQHIFLNNYQLCSEISEPVLQHFVHLLATHGRHVQYLDFLHTVIKAEGKYVKKCQDMIMTELTNAGDDVVVFYNDKASLAHLLDMMKAARDGVEDHSPLMYHISLVDLLAACAEGKNVYTEIKCTSLLPLEDVVSVVTHEDCITEVKMAYVNFVNHCYVDTEVEMKEIYTSNHIWTLFENFTLDMARVCSKREKRVADPTLEKYVLSVVLDTINAFFSSPFSENSTSLQTHQTIVVQLLQSTTRLLECPWLQQQHKGSVEACIRTLAMVAKGRAILLPMDLDAHISSMLSSGASCAAAAQRNASSYKATTRAFPRVTPTANQWDYKNIIEKLQDIITALEERLKPLVQAELSVLVDVLHWPELLFLEGSEAYQRCESGGFLSKLIQHTKDLMESEEKLCIKVLRTLQQMLLKKTKYGDRGNQLRKMLLQNYLQNRKSTSRGDLPDPIGTGLDPDWSAIAATQCRLDKEGATKLVCDLITSTKNEKIFQESIGLAIHLLDGGNTEIQKSFHNLMMSDKKSERFFKVLHDRMKRAQQETKSTVAVNMNDLGSQPHEDREPVDPTTKGRVASFSIPGSSSRYSLGPSLRRGHEVSERVQSSEMGTSVLIMQPILRFLQLLCENHNRDLQNFLRCQNNKTNYNLVCETLQFLDIMCGSTTGGLGLLGLYINEDNVGLVIQTLETLTEYCQGPCHENQTCIVTHESNGIDIITALILNDISPLCKYRMDLVLQLKDNASKLLLALMESRHDSENAERILISLRPQELVDVIKKAYLQEEERENSEVSPREVGHNIYILALQLSRHNKQLQHLLKPVKRIQEEEAEGISSMLSLNNKQLSQMLKSSAPAQEEEEDPLAYYENHTSQIEIVRQDRSMEQIVFPVPGICQFLTEETKHRLFTTTEQDEQGSKVSDFFDQSSFLHNEMEWQRKLRSMPLIYWFSRRMTLWGSISFNLAVFINIIIAFFYPYMEGASTGVLDSPLISLLFWILICFSIAALFTKRYSIRPLIVALILRSIYYLGIGPTLNILGALNLTNKIVFVVSFVGNRGTFIRGYKAMVMDMEFLYHVGYILTSVLGLFAHELFYSILLFDLIYREETLFNVIKSVTRNGRSILLTALLALILVYLFSIVGFLFLKDDFILEVDRLPNNHSTASPLGMPHGAAAFVDTCSGDKMDCVSGLSVPEVLEEDRELDSTERACDTLLMCIVTVMNHGLRNGGGVGDILRKPSKDESLFPARVVYDLLFFFIVIIIVLNLIFGVIIDTFADLRSEKQKKEEILKTTCFICGLERDKFDNKTVSFEEHIKLEHNMWNYLYFIVLVRVKNKTDYTGPESYVAQMIKNKNLDWFPRMRAMSLVSNEGEGEQNEIRILQDKLNSTMKLVSHLTAQLNELKEQMTEQRKRRQRLGFVDVQNCISR

SEQ ID NO: 248 - protein, 1989 aa, Homo sapiens
MTKVPPAFDFSFLNDEEARKILQVLERNEELQRAEKDRISKLQKTKRDIRWLQGVTGEWFEEIQRKKFCNETDVSQMLKQPLTYRLSKEMAKNDPIELPTSRSKNVTNQKKPTPFSSRMSFRSSFASLFSFRKSGKETSKLPSLGQKGCDGHAGPPMPVRGAAVQAKIYNSPLENHLVDSTFVPKPAVMREESGMPPPWDASLLENEFFQVLDDLDSKLAQEQSASSVNTRTPLNYGSRTQFGHFYSSGNRHGNITERHKKHYNETSNMSIYDILRPGTPREGFKTFSPRTSTIYDMYRTREPRVFKEDYVQKNTFGSTSLCFDSRQRSALPATGHFTARSLHFPATTQSKSGFIPPRHQQSPKRTPLSSIIWNRSDSSRDRENQEEFLRAPSPMEIDPADKYVYPRGFQENKRYESYHSQNVYQRVSLNAPMENAMSPDTFENSENMPFYHQSNTFTRSFFSNTFGRSGEQRRFGQGPFWGQEKGHSFWSDFHRSRKSFSSSDRDFEMISMEANSVSAIHGHNVSSEHWESFSSGYGTDVSRGQEEPHPWQFDFQRSTLDSMVVSHGNETQLTPHFGTPNVCSMTGSSYHVKSSELVSQQDSSPVEVHINKEASSFGIAQTLASSFKTSFSQISDDRRNPQSPNLQNPTVTLQKIFPNKPASHPMRSHTEVTVTSSNSVDSLPLAKSQPNILVTEVNNEKDLNESISEEDKQLSKMDQTNKAGEIPQPVSQTGISNSLPDFQNPLSQDSAKSNGFGFNASTIISSKKSPRVFSRKDTSKMYIPHTDKSNDIKQDKRFTENRKLGSTASLPFIQEHRTPPSFPRTDQGCHQELTVNNEDISRIITNNHWSSALTDTQNAQYSKCKLTPGHKTSCDSLDLSSAALPDSSPSKNSSLDAPVVPSTTVFSRRSPSDKDPSLGEREEKDNAGKNQKNQFIVSHSENQERNDSPVPTHDEVVDVKCHSHSPFRNERGKGKIRHHISCIEKLSKTESISVPTSDHRSLIEANQSNSKVSELDTIYCTLPRKSSSFLIHGRQSGSKIMAASLRNGPPPFQIKNNVEDAMGNYMLNKFSPSSPESANECSKVLSDSALEAPEATERMTNVKSSGSTSVRKGPLPFLINRAMSCPSGEPHASTGREGRKKPLTSGMDASELTPRAWERIISPVESDSSVRDCSLTKRQHQKENFQEYTEKEGKMAASRRSVFALSNEDPLPFCSDLSGKERGKTLHKVKTTSTFSVSGDEDNVKCLEVVSIYYTLPRKPSKKFCNLLQQYTQNTNLLIESPQVETETFPNALEKDKQNYSTREQSGTPSCENLKMSVNSDQTLTTENMTAFRLSNRGPLAPTLQEMASVEAAVSLPEEESKAREIFSDNLAKTPLGDSENKKERGKKLQSETLHTSLMLQRKNVSEEKSENCQQSINSSNSGPSSLPALSEVNIGNSQTRRSSWECTGSGRAIPFTGSGKCPQKDHTSTAVGDGSSGSQPREGRGDIGTNCQKMTNKTLSHSESQVFALTPALHKLQLGEETQSDEPNLESLQSEPRELPQRSQEANMTESRKAEDEMQKSAWDQPSLPEGNKNKTNLDDLVKGENRSSVKHRLAAMSKASRKFPAKDVSPRRHVATIFPQSGSRSGFDHLSLGTVECNPLFPEPTPKSAESIGESRLSENGKHVKKSENLLPITVLPNREPSTHVSNQKSNSISQRHQNEFKNVSESPSKHENSKDVTAAQNLVRESGAPSPITFTSLREAEFSDNQRRLSPPFPLEPAQKSRVSSPLASFLQQQRSASSLEWEPEPHLYRSKSLKSINVHGDLLRKSHPPKVRERHFSESTSIDNALSRLTLGNEFSVNNGYSRRFRSFSELPSCDGNESWAYRSGTKTGPRSAISIYRPIDYGIFGKEQQLAFLENVKRSLTQGRLWKPSFLKNPGFLKDDLRNPPNPSESLSSNSPSSQVPEDGLSPSEPLNIYEDDPVDSDCDTDTTTDDEYYLDENDKESEL

SEQ ID NO: 249 - protein, 2620 aa, Homo sapiens
MESEEEQHMTTLLCMGFSDPATIRKALRLAKNDINEAVALLTNERPGLDYGGYEPMDSGGGPSPGPGGGPRGDGGGDGGGGGPSRGGSTGGGGGFDPPPAYHEVVDAEKNDENGNCSGEGIEFPTTNLYELESRVLTDHWSIPYKREESLGKCLLASTYLARLGLSESDENCRRFMDRCMPEAFKKLLTSSAVHKWGTEIHEGIYNMLMLLIELVAERIKQDPIPTGLLGVLTMAFNPDNEYHFKNRMKVSQRNWAEVFGEGNMFAVSPVSTFQKEPHGWVVDLVNKFGELGGFAAIQAKLHSEDIELGAVSALIQPLGVCAEYLNSSVVQPMLDPVILTTIQDVRSVEEKDLKDKRLVSIPELLSAVKLLCMRFQPDLVTIVDDLRLDILLRMLKSPHFSAKMNSLKEVTKLIEDSTLSKSVKNAIDTDRLLDWLVENSVLSIALEGNIDQAQYCDRIKGIIELLGSKLSLDELTKIWKIQSGQSSTVIENIHTIIAAAAVKFNSDQLNHLFVLIQKSWETESDRVRQKLLSLIGRIGREARFETTSGKVLDVLWELAHLPTLPSSLIQQALEEHLTILSDAYAVKEAIKRSYIIKCIEDIKRPGEWSGLEKNKKDGFKSSQLNNPQFVWVVPALRQLHEITRSFIKQTYQKQDKSIIQDLKKNFEIVKLVTGSLIACHRLAAAVAGPGGLSGSTLVDGRYTYREYLEAHLKFLAFFLQEATLYLGWNRAKEIWECLVTGQDVCELDREMCFEWFTKGQHDLESDVQQQLFKEKILKLESYEITMNGFNLFKTFFENVNLCDHRLKRQGAQLYVEKLELIGMDFIWKIAMESPDEEIANEAIQLIINYSYINLNPRLKKDSVSLHKKFIADCYTRLEAASSALGGPTLTHAVTRATKMLTATAMPTVATSVQSPYRSTKLVIIERLLLLAERYVITIEDFYSVPRTILPHGASFHGHLLTLNVTYESTKDTFTVEAHSNETIGSVRWKIAKQLCSPVDNIQIFTNDSLLTVNKDQKLLHQLGFSDEQILTVKTSGSGTPSGSSADSSTSSSSSSSGVFSSSYAMEQEKSLPGVVMALVCNVFDMLYQLANLEEPRITLRVRKLLLLIPTDPAIQEALDQLDSLGRKKTLLSESSSQSSKSPSLSSKQQHQPSASSILESLFRSFAPGMSTFRVLYNLEVLSSKLMPTADDDMARSCAKSFCENFLKAGGLSLVVNVMQRDSIPSEVDYETRQGVYSICLQLARFLLVGQTMPTLLDEDLTKDGIEALSSRPFRNVSRQTSRQMSLCGTPEKSSYRQLSVSDRSSIRVEEIIPAARVAIQTMEVSDFTSTVACFMRLSWAAAAGRLDLVGSSQPIKESNSLCPAGIRNRLSSSGSNCSSGSEGEPVALHAGICVRQQSVSTKDSLIAGEALSLLVTCLQLRSQQLASFYNLPCVADFIIDILLGSPSAEIRRVACDQLYTLSQTDTSAHPDVQKPNQFLLGVILTAQLPLWSPTSIMRGVNQRLLSQCMEYFDLRCQLLDDLTTSEMEQLRISPATMLEDEITWLDNFEPNRTAECETSEADNILLAGHLRLIKTLLSLCGAEKEMLGSSLIKPLLDDFLFRASRIILNSHSPAGSAAISQQDFHPKCSTANSRLAAYEVLVMLADSSPSNLQIIIKELLSMHHQPDPALTKEFDYLPPVDSRSSSGFVGLRNGGATCYMNAVFQQLYMQPGLPESLLSVDDDTDNPDDSVFYQVQSLFGHLMESKLQYYVPENFWKIFKMWNKELYVREQQDAYEFFTSLIDQMDEYLKKMGRDQIFKNTFQGIYSDQKICKDCPHRYEREEAFMALNLGVTSCQSLEISLDQFVRGEVLEGSNAYYCEKCKEKRITVKRTCIKSLPSVLVIHLMRFGFDWESGRSIKYDEQIRFPWMLNMEPYTVSGMARQDSSSEVGENGRSVDQGGGGSPRKKVALTENYELVGVIVHSGQAHAGHYYSFIKDRRGCGKGKWYKFNDTVIEEFDLNDETLEYECFGGEYRPKVYDQTNPYTDVRRRYWNAYMLFYQRVSDQNSPVLPKKSRVSVVRQEAEDLSLSAPSSPEISPQSSPRPHRPNNDRLSILTKLVKKGEKKGLFVEKMPARIYQMVRDENLKFMKNRDVYSSDYFSFVLSLASLNATKLKHPYYPCMAKVSLQLAIQFLFQTYLRTKKKLRVDTEEWIATIEALLSKSFDACQWLVEYFISSEGRELIKIFLLECNVREVRVAVATILEKTLDSALFYQDKLKSLHQLLEVLLALLDKDVPENCKNCAQYFFLFNTFVQKQGIRAGDLLLRHSALRHMISFLLGASRQNNQIRRWSSAQAREFGNLHNTVALLVLHSDVSSQRNVAPGIFKQRPPISIAPSSPLLPLHEEVEALLFMSEGKPYLLEVMFALRELTGSLLALIEMVVYCCFCNEHFSFTMLHFIKNQLETAPPHELKNTFQLLHEILVIEDPIQVERVKFVFETENGLLALMHHSNHVDSSRCYQCVKFLVTLAQKCPAAKEYFKENSHHWSWAVQWLQKKMSEHYWTPQSNVSNETSTGKTFQRTISAQDTLAYATALLNEKEQSGSSNGSESSPANENGDRHLQQGSESPMMIGELRSDLDDVDP

SEQ ID NO: 250 - protein, 2101 aa, Homo sapiens
MYFNFLTEWHAGSSLGNPDCPSSHLPIIGLGRRGGEVRLWPQRRHEAENRRSASSRWLQSAKRQVLRSGRGSEAAGKGSAACGPLGAGRPQLREATSAHGRCSCSRHQHMEQGSPRIGNPRPGLRLQPRGPRGQPGRGKSGSLRQERRAWASAGGAGGAHPPAGWRRTQGSGGHPTGAPPAPAGARAAVPPASGALAAAVATPDPVLPPRTHQRGPRGRRSGDVGLTALHLACATGQPEMVHLLVSRRCELNLCDREDRTPLIKAVQLRQEACATLLLQNGADPNITDVFGRTALHYAVYNEDTSMIEKLLSYGANIEECSEDEYPPLFLAVSQRKVKMVEFLLKKKANINAVDYLGRSALIHAVTLGEKDIVILLLQHNIDVFSRDVYGKLAEDYASEAKNRVIFELIYEYERKKHEELSINSNPVSSQKQPALKATSGKEDSISNIATEIKDGQKSGTVSSQKQPALKDTSDKNDSVSNTATEIKDEQKSGTVLPAVEQCLNRSLYRPDAVAQPVTEDEFALESEIISKLYIPKRKIISPRSIEDVLPPVEEAVDRCLYLLDRFAQAVTKDKFALESENISEPYFTNRRTISQQSAEKLDAACGIDKTENGTLFEDQNVDKEGKALPATGQKANVSPEQPPLFTHTVKDSDHISTRFLGSMDSLTSSEESSERPPLSTLTLKEADPSSKAAMRRKDSPPPGKVSSQKQPAEKATSDDKDSVSNIATEIKEGPISGTVSSQKQPAEKATSDEKDSVSNIATEIKEGQQSGTVSPQKQSAWKVIFKKKVSLLNIATRITGGGKSGTVSSQKQPPSKATSDKTDSALNIATEIKDGLQCGTVSSQKQPALKATTDEEDSVSNIATEIKDGEKSGTVSSQKQPALKATTDEEDSVLNIATEIKDGEKSETVSSQKQPALKATTDEEDSVSIIATEIKDGEKSGTVSSRKKPALKATSDEEDSVLNIARGKEDGEKTRRVSSRKKPALKATSDEKDSFSNITREKKDGETSRTVSSQKPPALKATSDEEDSVLSIAREEKDGEKSRTVSSEKPPGLKATRDEKDSLLNIARGKKYGEKTRRVSSRKKNSTQATSDEKDSFSNITRGKKDGEISRKVSSQKPPTLKGTSDEEDSVLGIARENKDGEKSRTVSSEKPPGLKASSDEKDSVLNIARGKKYGEKTKRVSSRKKAALKATSDEKDSFSNITRERKDGETSRTVSSQKPPALKATGDEEDSVLNIAREKKDGEKSRTVSSEKPSGLKATSDEKDSVLNIARGKKHGEKTRRVSSHKQPALKATSDKENSVPNMATETKDEQISGTVSSQKQPALKATSDKKDSVSNIPTEIKDGQQSGTVSSQKQPAWKATSVKKDSVSNIATEIKDGQIRGTGILEYTFNVMFDQIEEKFTSPNKSAGVSPQKQSAQKVIFKKKVSLLNIATRITGGWKSGTEYPENLPTLKATIENKNSVLNTATKMKDVQTSTPAEQDLEMASEGEQKRLEEYENNQPQVKNQIHSRDDLDDIIQSSQTVSEDGDSLCCNCKNVILLIDQHEMKCKDCVHLLKIKKTFCLCKRLTELKDNHCEQLRVKIRKLKNKASVLQKRLSEKEEIKSQLKHETLELEKELCSLRFAIQQEKKKRRNVEEVHQKVREKLRITEEQYRIEADVTKPIKPALKSAEVELKTGGNNSNQVSETDEKEDLLHENRLMQDEIARLRLEKDTIKNQNLEKKYLKDFEIVKRKHEDLQKALKRNEETLAETIACYSGQLAALTDENTTLRSKLEKQRESGQRLETEMQSYRCRLNAALCDHDQSHSSKRDQELAFQGTVDKCCHLQENLNSHVLILSLQLSKAESKFRVLETELHYTGEALKEKALVFEHVQSELKQKQSQMKDIEKMYKSGYNTMEKCIEKQERFCQLKKQNMLLQQQLDDARNKADNQEKAILNIQARCDARVENLQAECRKHRLLLEEDNKMLVNELNHSKEKKCQYEKEKAEREVAVRQLQQKQDDVLNKRSATKALLDASSRHCIYLENGMQDSRKKLDQMRSQFQEIQDQLTATIRCTKEMEGDAQKLEVENVMMRKIIKKQDEQIERFEKILQHSSLMLQVFES

SEQ ID NO: 251 - protein, 4588 aa, Homo sapiens
MGRHLALLLLLLLLFQHFGDSDGSQRLEQTPLQFTHLEYNVTVQENSAAKTYVGHPVKMGVYITHPAWEVRYKIVSGDSENLFKAEEYILGDFCFLRIRTKGGNTAILNREVKDHYTLIVKALEKNTNVEARTKVRVQVLDTNDLRPLFSPTSYSVSLPENTAIRTSIARVSATDADIGTNGEFYYSFKDRTDMFAIHPTSGVIVLTGRLDYLETKLYEMEILAADRGMKLYGSSGISSMAKLTVHIEQANECAPVITAVTLSPSELDRDPAYAIVTVDDCDQGANGDIASLSIVAGDLLQQFRTVRSFPGSKEYKVKAIGGIDWDSHPFGYNLTLQAKDKGTPPQFSSVKVIHVTSPQFKAGPVKFEKDVYRAEISEFAPPNTPVVMVKAIPAYSHLRYVFKSTPGKAKFSLNYNTGLISILEPVKRQQAAHFELEVTTSDRKASTKVLVKVLGANSNPPEFTQTAYKAAFDENVPIGTTVMSLSAVDPDEGENGYVTYSIANLNHVPFAIDHFTGAVSTSENLDYELMPRVYTLRIRASDWGLPYRREVEVLATITLNNLNDNTPLFEKINCEGTIPRDLGVGEQITTVSAIDADELQLVQYQIEAGNELDFFSLNPNSGVLSLKRSLMDGLGAKVSFHSLRITATDGENFATPLYINITVAASHKLVNLQCEETGVAKMLAEKLLQANKLHNQGEVEDIFFDSHSVNAHIPQFRSTLPTGIQVKENQPVGSSVIFMNSTDLDTGFNGKLVYAVSGGNEDSCFMIDMETGMLKILSPLDRETTDKYTLNITVYDLGIPQKAAWRLLHVVVVDANDNPPEFLQESYFVEVSEDKEVHSEIIQVEATDKDLGPNGHVTYSIVTDTDTFSIDSVTGVVNIARPLDRELQHEHSLKIEARDQAREEPQLFSTVVVKVSLEDVNDNPPTFIPPNYRVKVREDLPEGTVIMWLEAHDPDLGQSGQVRYSLLDHGEGNFDVDKLSGAVRIVQQLDFEKKQVYNLTVRAKDKGKPVSLSSTCYVEVEVVDVNENLHPPVFSSFVEKGTVKEDAPVGSLVMTVSAHDEDARRDGEIRYSIRDGSGVGVFKIGEETGVIETSDRLDRESTSHYWLTVFATDQGVVPLSSFIEIYIEVEDVNDNAPQTSEPVYYPEIMENSPKDVSVVQIEAFDPDSSSNDKLMYKITSGNPQGFFSIHPKTGLITTTSRKLDREQQDEHILEVTVTDNGSPPKSTIARVIVKILDENDNKPQFLQKFYKIRLPEREKPDRERNARREPLYHVIATDKDEGPNAEISYSIEDGNEHGKFFIEPKTGVVSSKRFSAAGEYDILSIKAVDNGRPQKSSTTRLHIEWISKPKPSLEPISFEESFFTFTVMESDPVAHMIGVISVEPPGIPLWFDITGGNYDSHFDVDKGTGTIIVAKPLDAEQKSNYNLTVEATDGTTTILTQVFIKVIDTNDHRPQFSTSKYEVVIPEDTAPETEILQISAVDQDEKNKLIYTLQSSRDPLSLKKFRLDPATGSLYTSEKLDHEAVHQHTLTVMVRDQDVPVKRNFARIVVNVSDTNDHAPWFTASSYKGRVYESAAVGSVVLQVTALDKDKGKNAEVLYSIESGNIGNSFMIDPVLGSIKTAKELDRSNQAEYDLMVKATDKGSPPMSEITSVRIFVTIADNASPKFTSKEYSVELSETVSIGSFVGMVTAHSQSSVVYEIKDGNTGDAFDINPHSGTIITQKALDFETLPIYTLIIQGTNMAGLSTNTTVLVHLQDENDNAPVFMQAEYTGLISESASINSVVLTDRNVPLVIRAADADKDSNALLVYHIVEPSVHTYFAIDSSTGAIHTVLSLDYEETSIFHFTVQVHDMGTPRLFAEYAANVTVHVIDINDCPPVFAKPLYEASLLLPTYKGVKVITVNATDADSSAFSQLIYSITEGNIGEKFSMDYKTGALTVQNTTQLRSRYELTVRASDGRFAGLTSVKINVKESKESHLKFTQDVYSAVVKENSTEAETLAVITAIGNPINEPLFYHILNPDRRFKISRTSGVLSTTGTPFDREQQEAFDVVVEVTEEHKPSAVAHVVVKVIVEDQNDNAPVFVNLPYYAVVKVDTEVGHVIRYVTAVDRDSGRNGEVHYYLKEHHEHFQIGPLGEISLKKQFELDTLNKEYLVTVVAKDGGNPAFSAEVIVPITVMNKAMPVFEKPFYSAEIAESIQVHSPVVHVQANSPEGLKVFYSITDGDPFSQFTINFNTGVINVIAPLDFEAHPAYKLSIRATDSLTGAHAEVFVDIIVDDINDNPPVFAQQSYAVTLSEASVIGTSVVQVRATDSDSEPNRGISYQMFGNHSKSHDHFHVDSSTGLISLLRTLDYEQSRQHTIFVRAVDGGMPTLSSDVIVTVDVTDLNDNPPLFEQQIYEARISEHAPHGHFVTCVKAYDADSSDIDKLQYSILSGNDHKHFVIDSATGIITLSNLHRHALKPFYSLNLSVSDGVFRSSTQVHVTVIGGNLHSPAFLQNEYEVELAENAPLHTLVMEVKTTDGDSGIYGHVTYHIVNDFAKDRFYINERGQIFTLEKLDRETPAEKVISVRLMAKDAGGKVAFCTVNVILTDDNDNAPQFRATKYEVNIGSSAAKGTSVVKVLASDADEGSNADITYAIEADSESVKENLEINKLSGVITTKESLIGLENEFFTFFVRAVDNGSPSKESVVLVYVKILPPEMQLPKFSEPFYTFTVSEDVPIGTEIDLIRAEHSGTVLYSLVKGNTPESNRDESFVIDRQSGRLKLEKSLDHETTKWYQFSILARCTQDDHEMVASVDVSIQVKDANDNSPVFESSPYEAFIVENLPGGSRVIQIRASDADSGTNGQVMYSLDQSQSVEVIESFAINMETGWITTLKELDHEKRDNYQIKVVASDHGEKIQLSSTAIVDVTVTDVNDSPPRFTAEIYKGTVSEDDPQGGVIAILSTTDADSEEINRQVTYFITGGDPLGQFAVETIQNEWKVYVKKPLDREKRDNYLLTITATDGTFSSKAIVEVKVLDANDNSPVCEKTLYSDTIPEDVLPGKLIMQISATDADIRSNAEITYTLLGSGAEKFKLNPDTGELKTSTPLDREEQAVYHLLVRATDGGGRFCQASIVLTLEDVNDNAPEFSADPYAITVFENTEPGTLLTRVQATDADAGLNRKILYSLIDSADGQFSINELSGIIQLEKPLDRELQAVYTLSLKAVDQGLPRRLTATGTVIVSVLDINDNPPVFEYREYGATVSEDILVGTEVLQVYAASRDIEANAEITYSIISGNEHGKFSIDSKTGAVFIIENLDYESSHEYYLTVEATDGGTPSLSDVATVNVNVTDINDNTPVFSQDTYTTVISEDAVLEQSVITVMADDADGPSNSHIHYSIIDGNQGSSFTIDPVRGEVKVTKLLDRETISGYTLTVQASDNGSPPRVNTTTVNIDVSDVNDNAPVFSRGNYSVIIQENKPVGFSVLQLVVTDEDSSHNGPPFFFTIVTGNDEKAFEVNPQGVLLTSSAIKRKEKDHYLLQVKVADNGKPQLSSLTYIDIRVIEESIYPPAILPLEIFITSSGEEYSGGVIGKIHATDQDVYDTLTYSLDPQMDNLFSVSSTGGKLIAHKKLDIGQYLLNVSVTDGKFTTVADITVHIRQVTQEMLNHTIAIRFANLTPEEFVGDYWRNFQRALRNILGVRRNDIQIVSLQSSEPHPHLDVLLFVEKPGSAQISTKQLLHKINSSVTDIEEIIGVRILNVFQKLCAGLDCPWKFCDEKVSVDESVMSTHSTARLSFVTPRHHRAAVCLCKEGRCPPVHHGCEDDPCPEGSECVSDPWEEKHTCVCPSGRFGQCPGSSSMTLTGNSYVKYRLTENENKLEMKLTMRLRTYSTHAVVMYARGTDYSILEIHHGRLQYKFDCGSGPGIVSVQSIQVNDGQWHAVALEVNGNYARLVLDQVHTASGTAPGTLKTLNLDNYVFFGGHIRQQGTRHGRSPQVGNGFRGCMDSIYLNGQELPLNSKPRSYAHIEESVDVSPGCFLTATEDCASNPCQNGGVCNPSPAGGYYCKCSALYIGTHCEISVNPCSSKPCLYGGTCVVDNGGFVCQCRGLYTGQRCQLSPYCKDEPCKNGGTCFDSLDGAVCQCDSGFRGERCQSDIDECSGNPCLHGALCENTHGSYHCNCSHEYRGRHCEDAAPNQYVSTPWNIGLAEGIGIVVFVAGIFLLVVVFVLCRKMISRKKKHQAEPKDKHLGPATAFLQRPYFDSKLNKNIYSDIPPQVPVRPISYTPSIPSDSRNNLDRNSFEGSAIPEHPEFSTFNPESVHGHRKAVAVCSVAPNLPPPPPSNSPSDSDSIQKPSWDFDYDTKVVDLDPCLSKKPLEEKPSQPYSARESLSEVQSLSSFQSESCDDNGYHWDTSDWMPSVPLPDIQEFPNYEVIDEQTPLYSADPNAIDTDYYPGGYDIESDFPPPPEDFPAADELPPLPPEFSNQFESIHPPRDMPAAGSLGSSSRNRQRFNLNQYLPNFYPLDMSEPQTKGTGENSTCREPHAPYPPGYQRHFEAPAVESMPMSVYASTASCSDVSACCEVESEVMMSDYESGDDGHFEEVTIPPLDSQQHTEV

SEQ ID NO: 252 - protein, 3925 aa, Homo sapiens
MPGERPRGAPPPTMTGDLQPRQVASSPGHPSQPPLEDNTPATRTTKGAREAGGQAQAMELPEAQPRQARDGELKPPSLRGQAPSSTPGKRGSPQTPPGRSPLQAPSRLAGRAEGSPPQRYILGIASSRTKPTLDETPENPQLEAAQLPEVDTPQGPGTGAPLRPGLPRTEAQPAAEELGFHRCFQEPPSSFTSTNYTSPSATPRPPAPGPPQSRGTSPLQPGSYPEYQASGADSWPPAAENSFPGANFGVPPAEPEPIPKGSRPGGSPRGVSFQFPFPALHGASTKPFPADVAGHAFTNGPLVFAFHQPQGAWPEEAVGTGPAYPLPTQPAPSPLPCYQGQPGGLNRHSDLSGALSSPGAAHSAPRPFSDSLHKSLTKILPERPPSAQDGLGSTRGPPSSLPQRHFPGQAYRASGVDTSPGPPDTELAAPGPPPARLPQLWDPTAAPYPTPPGGPLAATRSMFFNGQPSPGQRLCLPQSAPLPWPQVLPTARPSPHGMEMLSRLPFPAGGPEWQGGSQGALGTAGKTPGPREKLPAVRSSQGGSPALFTYNGMTDPGAQPLFFGVAQPQVSPHGTPSLPPPRVVGASPSESPLPSPATNTAGSTCSSLSPMSSSPANPSSEESQLPGPLGPSAFFHPPTHPQETGSPFPSPEPPHSLPTHYQPEPAKAFPFPADGLGAEGAFQCLEETPFPHEGPEVGRGGLQGFPRAPPPYPTHHFSLSSASLDQLDVLLTCRQCDRNYSSLAAFLAHRQFCGLLLARAKDGHQRSPGPPGLPSPPAAPRVPADAHAGLLSHAKTFLLAGDAQAEGKDDPLRTGFLPSLAATPFPLPASDLDMEDDAKLDSLITEALNGMEYQSDNPEIDSSFIDVFADEEPSGPRGPSSGHPLKSKAGVTPESKAPPPLPAATPDPQTPRPGDRGCPARGRPKTRSLGLAPTEADAPSQGRQQRRGKQLKLFRKDLDSGGAAEGSGSGGGGRASGLRPRRNDGLGERPPPRPRRPRTQAPGSRADPAPRVPRAAALPEETRSSRRRRLPPRKDPRKRKARGGAWGKELILKIVQQKNRLREYDFASESEEDEQPPPRGPGFRGRRGRGEKRKEVELTQGPREDEPQKPRKAARQEAGGDGAPANPEEPGGSRPGPGRSPQARGPSRSLETGAAAREGGPKCADRPSVAPKDPLQVPTNTETSEETRPSLDFPQEAKEPETAEESAPDSTEFTEALRSPPAACAGEMGASPGLLIPEQPPPSRHDTGTPKPSGSLANTAPHGSSPTPGVGSLLGGPGGTQAPVSHNSKDPPARQPGEFLAPVANPSSTACPKPSVLSSKISSFGCDPAGFNRDPLGVPVAKKGPQPYSSPHSELFLGPKDLAGCFLEELHPKPSARDAPPASSSCLCQDGEDAGSLEPQLPRSPPGTAETEPGRAASPPTLESSSLFPDLPVDRFDPPLYGSLSANRDSGLPFACADPPQKTVPSDPPYPSFLLLEEVSPMLPSHFPDLSGGKVLSKTCPPERTVVPGAAPSLPGKGSGCSVALMSHLSEDELEIQKLVTELESQLQRSKDTRGAPRELAEAESVGRVELGTGTEPPSQRRTCQATVPHEDTFSAADLTRVGESTAHREGAESAVATVEAVQGRPGGTWPCPASFHPGHAALLPCAQEDLVSGAPFSPRGANFHFQPVQKAGASKTGLCQAEGDSRPPQDVCLPEPSKQPGPQLDAGSLAKCSPDQELSFPKNKEAASSQESEDSLRLLPCEQRGGFLPEPGTADQPHRGAPAPEAFGSPAVHLAPDLAFQGDGAPPLDATWPFGASPSHAAQGHSAGRAGGHLHPTAGRPGFEGNEFAPAGASSLTAPRGREAWLVPVPSPACVSNTHPSRRSQDPALSPPIRQLQLPGPGVAKSKDGILGLQELTPAAQSPPRVNPSGLEGGTVEGGKVACGPAQGSPGGVQVTTLPAVAGHQLGLEADGHWGLLGQAEKTQGQGTANQLQPENGVSPGGTDNHASVNASPKTALTGPTEGAVLLEKCKGSRAAMSLQEEAEPTPSPPSPNRESLALALTAAHSRSGSEGRTPERASSPGLNKPLLATGDSPAPSVGDLAACAPSPTSAAHMPCSLGPLPREDPLTSPSRAQGGLGGQLPASPSCRDPPGPQQLLACSPAWAPLEEADGVQATTDTGAEDSPVAPPSLTTSPCDPKEALAGCLLQGEGSPLEDPSSWPPGSVSAVTCTHSGDTPKDSTLRIPEDSRKEKLWESPGRATSPPLAGAVSPSVAVRATGLSSTPTGDEAQAGRGLPGPDPQSRGAPPHTNPDRMPRGHSSYSPSNTARLGHREGQAVTAVPTEPPTLQGAGPDSPACLEGEMGTSSKEPEDPGTPETGRSGATKMPRVTCPSTGLGLGRTTAPSSTASDFQSDSPQSHRNASHQTPQGDPLGPQDLKQRSRGYKKKPASTENGQWKGQAPHGPVTCEVCAASFRSGPGLSRHKARKHRPHPGAPAEPSPAALPAQQPLEPLAQKCQPPRKKSHRVSGKERPNHSRGDPSHVTQPPPAQGSKEVLRAPGSPHSQQLHPPSPTEHEVDVKTPASKPRPDQAREDELHPKQAEKREGRRWRREPTVDSPSHSEGKSNKKRGKLRGRRLREESILPVSADVISDGRGSRPSPAMASYAASPSHCLSVEGGPEADGEQPPRLATLGPGVMEGAAETDQEALCAGETGAQKPPGDRMLCPGRMDGAALGEQPTGQKGASARGFWGPRETKALGVCKESGSEPAEDSSRAHSRSEEGVWEENTPPLGPLGFPETSSSPADSTTSSCLQGLPDNPDTQGGVQGPEGPTPDASGSSAKDPPSLFDDEVSFSQLFPPGGRLTRKRNPHVYGKRCEKPVLPLPTQPSFEEGGDPTLGPARLPTDLSDSSSLCLCHEDPWEDEDPAGLPESFLLDGFLNSRVPGIDPWAPGLSLWALEPSREAGAEKLPSHCPEDDRPEAIPELHMVPAAWRGLEMPAPADDSSSSLGDVSPEPPSLERERCDGGLPGNTHLLPLRATDFEVLSTKFEMQDLCFLGPFEDPVGLPGPSFLDFEGTASSQGPQSRRTEEAAGAGRAQGRGRPAKGRRASYKCKVCFQRFRSLGELDLHKLAHTPAPPPTCYMCVERRFGSRELLRGHLQERHAQSKAGPWACGMCLKEVADVWMYNEHLREHAVRFARRGQARRSLGDLPGGLEGSSAVAHLLNSITEPAPKHHRGKRSAGKAAGSPGDPWGQEGEAKKDSPGERAKPRARSTPSNPDGAATPDSASATALADAGSPGPPRTTPSPSPDPWAGGEPLLQATPVHEACKDPSRDCHHCGKRFPKPFKLQRHLAVHSPQRVYLCPRCPRVYPEHGELLAHLGGAHGLLERPELQHTPLYACELCATVMRIIKKSFACSSCNYTFAKKEQFDRHMNKHLRGGRQPFAFRGVRRPGAPGQKARALEGTLPSKRRRVAMPGSAPGPGEDRPPPRGSSPILSEGSLPALLHLCSEVAPSTTKGWPETLERPVDPVTHPIRGCELPSNHQECPPPSLSPFPAALADGRGDCALDGALERPENEASPGSPGPLLQQALPLGASLPRPGARGQDAEGKRAPLVFSGKRRAPGARGRCAPDHFQEDHLLQKEKEVSSSHMVSEGGPRGTFHKGSATKPAGCQSSSKDRSAASTPSKALKFPVHPRKAVGSLAPGELARGTENGMKPATPKAKPGPSSQGSGSPRPGTKTGGGSQPQPASGQLQSETATTPAKPSFPSRSPAPERLPARAQAKSCTKGPREAGEQGPHGSLGPKEKGESSTKRKKGQVPGPARSESVGSFGRAPSAPDKPPRTPRKQATPSRVLPTKPKPNSQNKPRPPPSEQRKAEPGHTQRKDRLGKAFPQGRPLLRPPKRGTAVHGAEPAEPHTHRTAEAQSDLLSQLFGQRLTGFKIPLKKDASE

SEQ ID NO: 253 - protein, 3267 aa, Homo sapiens
MQKARGTRGEDAGTRAPPSPGVPPKRAKVGAGGGAPVAVAGAPVFLRPLKNAAVCAGSDVRLRVVVSGTPQPSLRWFRDGQLLPAPAPEPSCLWLRRCGAQDAGVYSCMAQNERGRASCEAVLTVLEVGDSETAEDDISDVQGTQRLELRDDGAFSTPTGGSDTLVGTSLDTPPTSVTGTSEEQVSWWGSGQTVLEQEAGSGGGTRRLPGSPRQAQATGAGPRHLGVEPLVRASRANLVGASWGSEDSLSVASDLYGSAFSLYRGRALSIHVSVPQSGLRREEPDLQPQLASEAPRRPAQPPPSKSALLPPPSPRVGKRSPPGPPAQPAATPTSPHRRTQEPVLPEDTTTEEKRGKKSKSSGPSLAGTAESRPQTPLSEASGRLSALGRSPRLVRAGSRILDKLQFFEERRRSLERSDSPPAPLRPWVPLRKARSLEQPKSERGAPWGTPGASQEELRAPGSVAERRRLFQQKAASLDERTRQRSPASDLELRFAQELGRIRRSTSREELVRSHESLRATLQRAPSPREPGEPPLFSRPSTPKTSRAVSPAAAQPPSPSSAEKPGDEPGRPRSRGPAGRTEPGEGPQQEVRRRDQFPLTRSRAIQECRSPVPPPAADPPEARTKAPPGRKREPPAQAVRFLPWATPGLEGAAVPQTLEKNRAGPEAEKRLRRGPEEDGPWGPWDRRGARSQGKGRRARPTSPELESSDDSYVSAGEEPLEAPVFEIPLQNVVVAPGADVLLKCIITANPPPQVSWHKDGSALRSEGRLLLRAEGERHTLLLREARAADAGSYMATATNELGQATCAASLTVRPGGSTSPFSSPITSDEEYLSPPEEFPEPGETWPRTPTMKPSPSQNRRSSDTGSKAPPTFKVSLMDQSVREGQDVIMSIRVQGEPKPVVSWLRNRQPVRPDQRRFAEEAEGGLCRLRILAAERGDAGFYTCKAVNEYGARQCEARLEVRAHPESRSLAVLAPLQDVDVGAGEMALFECLVAGPTDVEVDWLCRGRLLQPALLKCKMHFDGRKCKLLLTSVHEDDSGVYTCKLSTAKDELTCSARLTVRPSLAPLFTRLLEDVEVLEGRAARFDCKISGTPPPVVTWTHFGCPMEESENLRLRQDGGLHSLHIAHVGSEDEGLYAVSAVNTHGQAHCSAQLYVEEPRTAASGPSSKLEKMPSIPEEPEQGELERLSIPDFLRPLQDLEVGLAKEAMLECQVTGLPYPTISWFHNGHRIQSSDDRRMTQYRDVHRLVFPAVGPQHAGVYKSVIANKLGKAACYAHLYVTDVVPGPPDGAPQVVAVTGRMVTLTWNPPRSLDMAIDPDSLTYTVQHQVLGSDQWTALVTGLREPGWAATGLRKGVQHIFRVLSTTVKSSSKPSPPSEPVQLLEHGPTLEEAPAMLDKPDIVYVVEGQPASVTVTFNHVEAQVVWRSCRGALLEARAGVYELSQPDDDQYCLRICRVSRRDMGALTCTARNRHGTQTCSVTLELAEAPRFESIMEDVEVGAGETARFAVVVEGKPLPDIMWYKDEVLLTESSHVSFVYEENECSLVVLSTGAQDGGVYTCTAQNLAGEVSCKAELAVHSAQTAMEVEGVGEDEDHRGRRLSDFYDIHQEIGRGAFSYLRRIVERSSGLEFAAKFIPSQAKPKASARREARLLARLQHDCVLYFHEAFERRRGLVIVTELCTEELLERIARKPTVCESEIRAYMRQVLEGIHYLHQSHVLHLDVKPENLLVWDGAAGEQQVRICDFGNAQELTPGEPQYCQYGTPEFVAPEIVNQSPVSGVTDIWPVGVVAFLCLTGISPFVGENDRTTLMNIRNYNVAFEETTFLSLSREARGFLIKVLVQDRLRPTAEETLEHPWFKTQAKGAEVSTDHLKLFLSRRRWQRSQISYKCHLVLRPIPELLRAPPERVWVTMPRRPPPSGGLSSSSDSEEEELEELPSVPRPLQPEFSGSRVSLTDIPTEDEALGTPETGAATPMDWQEQGRAPSQDQEAPSPEALPSPGQEPAAGASPRRGELRRGSSAESALPRAGPRELGRGLHKAASVELPQRRSPSPGATRLARGGLGEGEYAQRLQALRQRLLRGGPEDGKVSGLRGPLLESLGGRARDPRMARAASSEAAPHHQPPLENRGLQKSSSFSQGEAEPRGRHRRAGAPLEIPVARLGARRLQESPSLSALSEAQPSSPARPSAPKPSTPKSAEPSATTPSDAPQPPAPQPAQDKAPEPRPEPVRASKPAPPPQALQTLALPLTPYAQIIQSLQLSGHAQGPSQGPAAPPSEPKPHAAVFARVASPPPGAPEKRVPSAGGPPVLAEKARVPTVPPRPGSSLSSSIENLESEAVFEAKFKRSRESPLSLGLRLLSRSRSEERGPFRGAEEEDGIYRPSPAGTPLELVRRPERSRSVQDLRAVGEPGLVRRLSLSLSQRLRRTPPAQRHPAWEARGGDGESSEGGSSARGSPVLAMRRRLSFTLERLSSRLQRSGSSEDSGGASGRSTPLFGRLRRATSEGESLRRLGLPHNQLAAQAGATTPSAESLGSEASATSGSSAPGESRSRLRWGFSRPRKDKGLSPPNLSASVQEELGHQYVRSESDFPPVFHIKLKDQVLLEGEAATLLCLPAACPAPHISWMKDKKSLRSEPSVIIVSCKDGRQLLSIPRAGKRHAGLYECSATNVLGSITSSCTVAVARVPGKLAPPEVPQTYQDTALVLWKPGDSRAPCTYTLERRVDGESVWHPVSSGIPDCYYNVTHLPVGVTVRFRVACANRAGQGPFSNSSEKVFVRGTQDSSAVPSAAHQEAPVTSRPARARPPDSPTSLAPPLAPAAPTPPSVTVSPSSPPTPPSQALSSLKAVGPPPQTPPRRHRGLQAARPAEPTLPSTHVTPSEPKPFVLDTGTPIPASTPQGVKPVSSSTPVYVVTSFVSAPPAPEPPAPEPPPEPTKVTVQSLSPAKEVVSSPGSSPRSSPRPEGTTLRQGPPQKPYTFLEEKARGRFGVVRACRENATGRTFVAKIVPYAAEGKRRVLQEYEVLRTLHHERIMSLHEAYITPRYLVLIAESCGNRELLCGLSDRFRYSEDDVATYMVQLLQGLDYLHGHHVLHLDIKPDNLLLAPDNALKIVDFGSAQPYNPQALRPLGHRTGTLEFMAPEMVKGEPIGSATDIWGAGVLTYIMLSGRSPFYEPDPQETEARIVGGRFDAFQLYPNTSQSATLFLRKVLSVHPWSRPSLQDCLAHPWLQDAYLMKLRRQTLTFTTNRLKEFLGEQRRRRAEAATRHKVLLRSYPGGP

SEQ ID NO: 254 - protein, 3333 aa, Homo sapiens
MAAAARPRGRALGPVLPPTPLLLLVLRVLPACGATARDPGAAAGLSLHPTYFNLAEAARIWATATCGERGPGEGRPQPELYCKLVGGPTAPGSGHTIQGQFCDYCNSEDPRKAHPVTNAIDGSERWWQSPPLSSGTQYNRVNLTLDLGQLFHVAYILIKFANSPRPDLWVLERSVDFGSTYSPWQYFAHSKVDCLKEFGREANMAVTRDDDVLCVTEYSRIVPLENGEVVVSLINGRPGAKNFTFSHTLREFTKATNIRLRFLRTNTLLGHLISKAQRDPTVTRRYYYSIKDISIGGQCVCNGHAEVCNINNPEKLFRCECQHHTCGETCDRCCTGYNQRRWRPAAWEQSHECEACNCHGHASNCYYDPDVERQQASLNTQGIYAGGGVCINCQHNTAGVNCEQCAKGYYRPYGVPVDAPDGCIPCSCDPEHADGCEQGSGRCHCKPNFHGDNCEKCAIGYYNFPFCLRIPIFPVSTPSSEDPVAGDIKGCDCNLEGVLPEICDAHGRCLCRPGVEGPRCDTCRSGFYSFPICQACWCSALGSYQMPCSSVTGQCECRPGVTGQRCDRCLSGAYDFPHCQGSSSACDPAGTINSNLGYCQCKLHVEGPTCSRCKLLYWNLDKENPSGCSECKCHKAGTVSGTGECRQGDGDCHCKSHVGGDSCDTCEDGYFALEKSNYFGCQGCQCDIGGALSSMCSGPSGVCQCREHVVGKVCQRPENNYYFPDLHHMKYEIEDGSTPNGRDLRFGFDPLAFPEFSWRGYAQMTSVQNDVRITLNVGKSSGSLFRVILRYVNPGTEAVSGHITIYPSWGAAQSKEIIFLPSKEPAFVTVPGNGFADPFSITPGIWVACIKAEGVLLDYLVLLPRDYYEASVLQLPVTEPCAYAGPPQENCLLYQHLPVTRFPCTLACEARHFLLDGEPRPVAVRQPTPAHPVMVDLSGREVELHLRLRIPQVGHYVVVVEYSTEAAQLFVVDVNVKSSGSVLAGQVNIYSCNYSVLCRSAVIDHMSRIAMYELLADADIQLKGHMARFLLHQVCIIPIEEFSAEYVRPQVHCIASYGRFVNQSATCVSLAHETPPTALILDVLSGRPFPHLPQQSSPSVDVLPGVTLKAPQNQVTLRGRVPHLGRYVFVIHFYQAAHPTFPAQVSVDGGWPRAGSFHASFCPHVLGCRDQVIAEGQIEFDISEPEVAATVKVPEGKSLVLVRVLVVPAENYDYQILHKKSMDKSLEFITNCGKNSFYLDPQTASRFCKNSARSLVAFYHKGALPCECHPTGATGPHCSPEGGQCPCQPNVIGRQCTRCATGHYGFPRCKPCSCGRRLCEEMTGQCRCPPRTVRPQCEVCETHSFSFHPMAGCEGCNCSRRGTIEAAMPECDRDSGQCRCKPRITGRQCDRCASGFYRFPECVPCNCNRDGTEPGVCDPGTGACLCKENVEGTECNVCREGSFHLDPANLKGCTSCFCFGVNNQCHSSHKRRTKFVDMLGWHLETADRVDIPVSFNPGSNSMVADLQELPATIHSASWVAPTSYLGDKVSSYGGYLTYQAKSFGLPGDMVLLEKKPDVQLTGQHMSIIYEETNTPRPDRLHHGRVHVVEGNFRHASSRAPVSREELMTVLSRLADVRIQGLYFTETQRLTLSEVGLEEASDTGSGRIALAVEICACPPAYAGDSCQGCSPGYYRDHKGLYTGRCVPCNCNGHSNQCQDGSGICVNCQHNTAGEHCERCQEGYYGNAVHGSCRACPCPHTNSFATGCVVNGGDVRCSCKAGYTGTQCERCAPGYFGNPQKFGGSCQPCSCNSNGQLGSCHPLTGDCINQEPKDSSPAEECDDCDSCVMTLLNDLATMGEQLRLVKSQLQGLSASAGLLEQMRHMETQAKDLRNQLLNYRSAISNHGSKIEGLERELTDLNQEFETLQEKAQVNSRKAQTLNNNVNRATQSAKELDVKIKNVIRNVHILLKQISGTDGEGNNVPSGDFSREWAEAQRMMRELRNRNFGKHLREAEADKRESQLLLNRIRTWQKTHQGENNGLANSIRDSLNEYEAKLSDLRARLQEAAAQAKQANGLNQENERALGAIQRQVKEINSLQSDFTKYLTTADSSLLQTNIALQLMEKSQKEYEKLAASLNEARQELSDKVRELSRSAGKTSLVEEAEKHARSLQELAKQLEEIKRNASGDELVRCAVDAATAYENILNAIKAAEDAANRAASASESALQTVIKEDLPRKAKTLSSNSDKLLNEAKMTQKKLKQEVSPALNNLQQTLNIVTVQKEVIDTNLTTLRDGLHGIQRGDIDAMISSAKSMVRKANDITDEVLDGLNPIQTDVERIKDTYGRTQNEDFKKALTDADNSVNKLTNKLPDLWRKIESINQQLLPLGNISDNMDRIRELIQQARDAASKVAVPMRFNGKSGVEVRLPNDLEDLKGYTSLSLFLQRPNSRENGGTENMFVMYLGNKDASRDYIGMAVVDGQLTCVYNLGDREAELQVDQILTKSETKEAVMDRVKFQRIYQFARLNYTKGATSSKPETPGVYDMDGRNSNTLLNLDPENVVFYVGGYPPDFKLPSRLSFPPYKGCIELDDLNENVLSLYNFKKTFNLNTTEVEPCRRRKEESDKNYFEGTGYARVPTQPHAPIPTFGQTIQTTVDRGLLFFAENGDRFISLNIEDGKLMVRYKLNSELPKERGVGDAINNGRDHSIQIKIGKLQKRMWINVDVQNTIIDGEVFDFSTYYLGGIPIAIRERFNISTPAFRGCMKNLKKTSGVVRLNDTVGVTKKCSEDWKLVRSASFSRGGQLSFTDLGLPPTDHLQASFGFQTFQPSGILLDHQTWTRNLQVTLEDGYIELSTSDSGSPIFKSPQTYMDGLLHYVSVISDNSGLRLLIDDQLLRNSKRLKHISSSRQSLRLGGSNFEGCISNVFVQRLSLSPEVLDLTSNSLKRDVSLGGCSLNKPPFLMLLKGSTRFNKTKTFRINQLLQDTPVASPRSVKVWQDACSPLPKTQANHGALQFGDIPTSHLLFKLPQELLKPRSQFAVDMQTTSSRGLVFHTGTKNSFMALYLSKGRLVFALGTDGKKLRIKSKEKCNDGKWHTVVFGHDGEKGRLVVDGLRAREGSLPGNSTISIRAPVYLGSPPSGKPKSLPTNSFVGCLKNFQLDSKPLYTPSSSFGVSSCLGGPLEKGIYFSEEGGHVVLAHSVLLGPEFKLVFSIRPRSLTGILIHIGSQPGKHLCVYLEAGKVTASMDSGAGGTSTSVTPKQSLCDGQWHSVAVTIKQHILHLELDTDSSYTAGQIPFPPASTQEPLHLGGAPANLTTLRIPVWKSFFGCLRNIHVNHIPVPVTEALEVQGPVSLNGCPDQ

SEQ ID NO: 255 - protein, 1844 aa, Homo sapiens
MVGVLAMAAAAAPPPVKDCEIEPCKKRKKDDDTSTCKTITKYLSPLGKTRDRVFAPPKPSNILDYFRKTSPTNEKTQLGKECKIKSPESVPVDSNKDCTTPLEMFSNVEFKKKRKRVNLSHQLNNIKTENEAPIEISSDDSKEDYSLNNDFVESSTSVLRYKKQVEVLAENIQDTKSQPNTMTSLQNSKKVNPKQGTTKNDFKKLRKRKCRDVVDLSESLPLAEELNLLKKDGKDTKQMENTTSHANSRDNVTEAAQLNDSIITVSYEEFLKSHKENKVEEIPDSTMSICVPSETVDEIVKSGYISESENSEISQQVRFKTVTVLAQVHPIPPKKTGKIPRIFLKQKQFEMENSLSDPENEQTVQKRKSNVVIQEEELELAVLEAGSSEAVKPKCTLEERQQFMKAFRQPASDALKNGVKKSSDKQKDLNEKCLYEVGRDDNSKKIMENSGIQMVSKNGNLQLHTDKGSFLKEKNKKLKKKNKKTLDTGAIPGKNREGNTQKKETTFFLKEKQYQNRMSLRQRKTEFFKSSTLFNNESLVYEDIANDDLLKVSSLCNNNKLSRKTSIPVKDIKLTQSKAESEASLLNVSTPKSTRRSGRISSTPTTETIRGIDSDDVQDNSQLKASTQKAANLSEKHSLYTAELITVPFDSESPIRMKFTRISTPKKSKKKSNKRSEKSEATDGGFTSQIRKASNTSKNISKAKQLIEKAKALHISRSKVTEEIAIPLRRSSRHQTLPERKKLSETEDSVIIIDSSPTALKHPEKNQKKLQCLNDVLGKKLNTSTKNVPGKMKVAPLFLVRKAQKAADPVPSFDESSQDTSEKSQDCDVQCKAKRDFLMSGLPDLLKRQIAKKAAALDVYNAVSTSFQRVVHVQQKDDGCCLWHLKPPSCPLLTKFKELNTKVIDLSKCGIALGEFSTLNSKLKSGNSAAVFMRTRKEFTEEVRNLLLEEIRWSNPEFSLKKYFPLLLKKQIEHQVLSSECHSKQELEADVSHKETKRKLVEAENSKSKRKKPNEYSKNLEKTNRKSEELSKRNNSSGIKLDSSKDSGTEDMLWTEKYQPQTASELIGNELAIKKLHSWLKDWKRRAELEERQNLKGKRDEKHEDFSGGIDFKGSSDDEEESRLCNTVLITGPTGVGKTAAVYACAQELGFKIFEVNASSQRSGRQILSQLKEATQSHQVDKQGVNSQKPCFFNSYYIGKSPKKISSPKKVVTSPRKVPPPSPKSSGPKRALPPKTLANYFKVSPKPKNNEEIGMLLENNKGIKNSFEQKQITQTKSTNATNSNVKDVGAEEPSRKNATSLILFEEVDVIFDEDAGFLNAIKTFMATTKRPVILTTSDPTFSLMFDGCFEEIKFSTPSLLNVASYLQMICLTENFRTDVKDFVTLLTANTCDIRKSILYLQFWIRSGGGVLEERPLTLYRGNSRNVQLVCSEHGLDNKIYPKNTKKKRVDLPKCDSGCAETLFGLKNIFSPSEDLFSFLKHKITMKEEWHKFIQLLTEFQMRNVDFLYSNLEFILPLPVDTIPETKNFCGPSVTVDASAATKSMNCLARKHSEREQPLKKSQKKKQKKTLVILDDSDLFDTDLDFPDQSISLSSVSSSSNAEESKTGDEESKARDKGNNPETKKSIPCPPKTTAGKKCSALVSHCLNSLSEFMDNMSFLDALLTDVREQNKYGRNDFSWTNGKVTSGLCDEFSLESNDGWTSQSSGELKAAAEALSFTKCSSAISKALETLNSCKKLGRDPTNDLTFYVSQKRNNVYFSQSAANLDNAWKRISVIKSVFSSRSLLYVGNRQASIIEYLPTLRNICKTEKLKEQGKSKRRFLHYFEGIHLDIPKETVNTLAADFP

SEQ ID NO: 256 - protein, 1865 aa, Homo sapiens
MTRWVPTKREEKYGVAFYNYDARGADELSLQIGDTVHILETYEGWYRGYTLRKKSKKGIFPASYIHLKEAIVEGKGQHETVIPGDLPLIQEVTTTLREWSTIWRQLYVQDNREMFRSVRHMIYDLIEWRSQILSGTLPQDELKELKKKVTAKIDYGNRILDLDLVVRDEDGNILDPELTSTISLFRAHEIASKQVEERLQEEKSQKQNIDINRQAKFAATPSLALFVNLKNVVCKIGEDAEVLMSLYDPVESKFISENYLVRWSSSGLPKDIDRLHNLRAVFTDLGSKDLKREKISFVCQIVRVGRMELRDNNTRKLTSGLRRPFGVAVMDVTDIINGKVDDEDKQHFIPFQPVAGENDFLQTVINKVIAAKEVNHKGQGLWVTLKLLPGDIHQIRKEFPHLVDRTTAVARKTGFPEIIMPGDVRNDIYVTLVQGDFDKGSKTTAKNVEVTVSVYDEDGKRLEHVIFPGAGDEAISEYKSVIYYQVKQPRWFETVKVAIPIEDVNRSHLRFTFRHRSSQDSKDKSEKIFALAFVKLMRYDGTTLRDGEHDLIVYKAEAKKLEDAATYLSLPSTKAELEEKGHSATGKSMQSLGSCTISKDSFQISTLVCSTKLTQNVDLLGLLKWRSNTSLLQQNLRQLMKVDGGEVVKFLQDTLDALFNIMMENSESETFDTLVFDALVFIIGLIADRKFQHFNPVLETYIKKHFSATLAYTKLTKVLKNYVDGAEKPGVNEQLYKAMKALESIFKFIVRSRILFNQLYENKGEADFVESLLQLFRSINDMMSSMSDQTVRVKGAALKYLPTIVNDVKLVFDPKELSKMFTEFILNVPMGLLTIQKLYCLIEIVHSDLFTQHDCREILLPMMTDQLKYHLERQEDLEACCQLLSHILEVLYRKDVGPTQRHVQIIMEKLLRTVNRTVISMGRDSELIGNFVACMTAILRQMEDYHYAHLIKTFGKMRTDVVDFLMETFIMFKNLIGKNVYPFDWVIMNMVQNKVFLRAINQYADMLNKKFLDQANFELQLWNNYFHLAVAFLTQESLQLENFSSAKRAKILNKYGDMRRQIGFEIRDMWYNLGQHKIKFIPEMVGPILEMTLIPETELRKATIPIFFDMMQCEFHSTRSFQMFENEIITKLDHEVEGGRGDEQYKVLFDKILLEHCRKHKYLAKTGETFVKLVVRLMERLLDYRTIMHDENKENRMSCTVNVLNFYKEIEREEMYIRYLYKLCDLHKECDNYTEAAYTLLLHAKLLKWSEDVCVAHLTQRDGYQATTQGQLKEQLYQEIIHYFDKGKMWEEAIALGKELAEQYENEMFDYEQLSELLKKQAQFYENIVKVIRPKPDYFAVGYYGQGFPTFLRGKVFIYRGKEYERREDFEARLLTQFPNAEKMKTTSPPGDDIKNSPGQYIQCFTVKPKLDLPPKFHRPVSEQIVSFYRVNEVQRFEYSRPIRKGEKNPDNEFANMWIERTIYTTAYKLPGILRWFEVKSVFMVEISPLENAIETMQLTNDKINSMVQQHLDDPSLPINPLSMLLNGIVDPAVMGGFANYEKAFFTDRYLQEHPEAHEKIEKLKDLIAWQIPFLAEGIRIHGDKVTEALRPFHERMEACFKQLKEKVEKEYGVRIMPSSLDDRRGSRPRSMVRSFTMPSSSRPLSVASVSSLSSDSTPSRPGSDGFALEPLLPKKMHSRSQDKLDKDDLEKEKKDKKKEKRNSKHQEIFEKEFKPTDISLQQSEAVILSETISPLRPQRPKSQVMNVIGSERRFSVSPSSPSSQQTPPPVTPRAKLSFSMQSSLELNGMTGADVADVPPPLPLKGSVADYGNLMENQDLLGSPTPPPPPPHQRHLPPPLPSKTPPPPPPKTTRKQTSVDSGIVQ

SEQ ID NO: 257 - protein, 3564 aa, Homo sapiens
MTAWRRFQSLLLLLGLLVLCARLLTAAKGQNCGGLVQGPNGTIESPGFPHGYPNYANCTWIIITGERNRIQLSFHTFALEEDFDILSVYDGQPQQGNLKVRLSGFQLPSSIVSTGSILTLWFTTDFAVSAQGFKALYEVLPSHTCGNPGEILKGVLHGTRFNIGDKIRYSCLPGYILEGHAILTCIVSPGNGASWDFPAPFCRAEGACGGTLRGTSSSISSPHFPSEYENNADCTWTILAEPGDTIALVFTDFQLEEGYDFLEISGTEAPSIWLTGMNLPSPVISSKNWLRLHFTSDSNHRRKGFNAQFQVKKAIELKSRGVKMLPSKDGSHKNSVLSQGGVALVSDMCPDPGIPENGRRAGSDFRVGANVQFSCEDNYVLQGSKSITCQRVTETLAAWSDHRPICRARTCGSNLRGPSGVITSPNYPVQYEDNAHCVWVITTTDPDKVIKLAFEEFELERGYDTLTVGDAGKVGDTRSVLYVLTGSSVPDLIVSMSNQMWLHLQSDDSIGSPGFKAVYQEIEKGGCGDPGIPAYGKRTGSSFLHGDTLTFECPAAFELVGERVITCQQNNQWSGNKPSCVFSCFFNFTASSGIILSPNYPEEYGNNMNCVWLIISEPGSRIHLIFNDFDVEPQFDFLAVKDDGISDITVLGTFSGNEVPSQLASSGHIVRLEFQSDHSTTGRGFNITYTTFGQNECHDPGIPINGRRFGDRFLLGSSVSFHCDDGFVKTQGSESITCILQDGNVVWSSTVPRCEAPCGGHLTASSGVILPPGWPGYYKDSLHCEWIIEAKPGHSIKITFDRFQTEVNYDTLEVRDGPASSSPLIGEYHGTQAPQFLISTGNFMYLLFTTDNSRSSIGFLIHYESVTLESDSCLDPGIPVNGHRHGGDFGIRSTVTFSCDPGYTLSDDEPLVCERNHQWNHALPSCDALCGGYIQGKSGTVLSPGFPDFYPNSLNCTWTIEVSHGKGVQMIFHTFHLESSHDYLLITEDGSFSEPVARLTGSVLPHTIKAGLFGNFTAQLRFISDFSISYEGFNITFSEYDLEPCDDPGVPAFSRRIGFHFGVGDSLTFSCFLGYRLEGATKLTCLGGGRRVWSAPLPRCVAECGASVKGNEGTLLSPNFPSNYDNNHECIYKIETEAGKGIHLRTRSFQLFEGDTLKVYDGKDSSSRPLGTFTKNELLGLILNSTSNHLWLEFNTNGSDTDQGFQLTYTSFDLVKCEDPGIPNYGYRIRDEGHFTDTVVLYSCNPGYAMHGSNTLTCLSGDRRVWDKPLPSCIAECGGQIHAATSGRILSPGYPAPYDNNLHCTWIIEADPGKTISLHFIVFDTEMAHDILKVWDGPVDSDILLKEWSGSALPEDIHSTFNSLTLQFDSDFFISKSGFSIQFSTSIAATCNDPGMPQNGTRYGDSREAGDTVTFQCDPGYQLQGQAKITCVQLNNRFFWQPDPPTCIAACGGNLTGPAGVILSPNYPQPYPPGKECDWRVKVNPDFVIALIFKSFNMEPSYDFLHIYEGEDSNSPLIGSYQGSQAPERIESSGNSLFLAFRSDASVGLSGFAIEFKEKPREACFDPGNIMNGTRVGTDFKLGSTITYQCDSGYKILDPSSITCVIGADGKPSWDQVLPSCNAPCGGQYTGSEGVVLSPNYPHNYTAGQICLYSITVPKEFVVFGQFAYFQTALNDLAELFDGTHAQARLLSSLSGSHSGETLPLATSNQILLRFSAKSGASARGFHFVYQAVPRTSDTQCSSVPEPRYGRRIGSEFSAGSIVRFECNPGYLLQGSTALHCQSVPNALAQWNDTIPSCVVPCSGNFTQRRGTILSPGYPEPYGNNLNCIWKIIVTEGSGIQIQVISFATEQNWDSLEIHDGGDVTAPRLGSFSGTTVPALLNSTSNQLYLHFQSDISVAAAGFHLEYKTVGLAACQEPALPSNSIKIGDRYMVNDVLSFQCEPGYTLQGRSHISCMPGTVRRWNYPSPLCIATCGGTLSTLGGVILSPGFPGSYPNNLDCTWRISLPIGYGAHIQFLNFSTEANHDFLEIQNGPYHTSPMIGQFSGTDLPAALLSTTHETLIHFYSDHSQNRQGFKLAYQAYELQNCPDPPPFQNGYMINSDYSVGQSVSFECYPGYILIGHPVLTCQHGINRNWNYPFPRCDAPCGYNVTSQNGTIYSPGFPDEYPILKDCIWLITVPPGHGVYINFTLLQTEAVNDYIAVWDGPDQNSPQLGVFSGNTALETAYSSTNQVLLKFHSDFSNGGFFVLNFHAFQLKKCQPPPAVPQAEMLTEDDDFEIGDFVKYQCHPGYTLVGTDILTCKLSSQLQFEGSLPTCEAQCPANEVRTGSSGVILSPGYPGNYFNSQTCSWSIKVEPNYNITIFVDTFQSEKQFDALEVFDGSSGQSPLLVVLSGNHTEQSNFTSRSNQLYLRWSTDHATSKKGFKIRYAAPYCSLTHPLKNGGILNRTAGAVGSKVHYFCKPGYRMVGHSNATCRRNPLGMYQWDSLTPLCQAVSCGIPESPGNGSFTGNEFTLDSKVVYECHEGFKLESSQQATAVCQEDGLWSNKGKPPTCKPVACPSIEAQLSEHVIWRLVSGSLNEYGAQVLLSCSPGYYLEGWRLLRCQANGTWNIGDERPSCRVISCGSLSFPPNGNKIGTLTVYGATAIFTCNTGYTLVGSHVRECLANGLWSGSETRCLAGHCGSPDPIVNGHISGDGFSYRDTVVYQCNPGFRLVGTSVRICLQDHKWSGQTPVCVPITCGHPGNPAHGFTNGSEFNLNDVVNFTCNTGYLLQGVSRAQCRSNGQWSSPLPTCRVVNCSDPGFVENAIRHGQQNFPESFEYGMSILYHCKKGFYLLGSSALTCMANGLWDRSLPKCLAISCGHPGVPANAVLTGELFTYGAVVHYSCRGSESLIGNDTRVCQEDSHWSGALPHCTGNNPGFCGDPGTPAHGSRLGDDFKTKSLLRFSCEMGHQLRGSPERTCLLNGSWSGLQPVCEAVSCGNPGTPTNGMIVSSDGILFSSSVIYACWEGYKTSGLMTRHCTANGTWTGTAPDCTIISCGDPGTLANGIQFGTDFTFNKTVSYQCNPGYVMEAVTSATIRCTKDGRWNPSKPVCKAVLCPQPPPVQNGTVEGSDFRWGSSISYSCMDGYQLSHSAILSCEGRGVWKGEIPQCLPVFCGDPGIPAEGRLSGKSFTYKSEVFFQCKSPFILVGSSRRVCQADGTWSGIQPTCIDPAHNTCPDPGTPHFGIQNSSRGYEVGSTVFFRCRKGYHIQGSTTRTCLANLTWSGIQTECIPHACRQPETPAHADVRAIDLPTFGYTLVYTCHPGFFLAGGSEHRTCKADMKWTGKSPVCKSKGVREVNETVTKTPVPSDVFFVNSLWKGYYEYLGKRQPATLTVDWFNATSSKVNATFSEASPVELKLTGIYKKEEAHLLLKAFQIKGQADIFVSKFENDNWGLDGYVSSGLERGGFTFQGDIHGKDFGKFKLERQDPLNPDQDSSSHYHGTSSGSVAAAILVPFFALILSGFAFYLYKHRTRPKVQYNGYAGHENSNGQASFENPMYDTNLKPTEAKAVRFDTTLNTVCTVV

SEQ ID NO: 258 - protein, 3571 aa, Homo sapiens
MWPRLAFCCWGLALVSGWATFQQMSPSRNFSFRLFPETAPGAPGSIPAPPAPGDEAAGSRVERLGQAFRRRVRLLRELSERLELVFLVDDSSSVGEVNFRSELMFVRKLLSDFPVVPTATRVAIVTFSSKNYVVPRVDYISTRRARQHKCALLLQEIPAISYRGGGTYTKGAFQQAAQILLHARENSTKVVFLITDGYSNGGDPRPIAASLRDSGVEIFTFGIWQGNIRELNDMASTPKEEHCYLLHSFEEFEALARRALHEDLPSGSFIQDDMVHCSYLCDEGKDCCDRMGSCKCGTHTGHFECICEKGYYGKGLQYECTACPSGTYKPEGSPGGISSCIPCPDENHTSPPGSTSPEDCVCREGYRASGQTCELVHCPALKPPENGYFIQNTCNNHFNAACGVRCHPGFDLVGSSIILCLPNGLWSGSESYCRVRTCPHLRQPKHGHISCSTREMLYKTTCLVACDEGYRLEGSDKLTCQGNSQWDGPEPRCVERHCSTFQMPKDVIISPHNCGKQPAKFGTICYVSCRQGFILSGVKEMLRCTTSGKWNVGVQAAVCKDVEAPQINCPKDIEAKTLEQQDSANVTWQIPTAKDNSGEKVSVHVHPAFTPPYLFPIGDVAIVYTATDLSGNQASCIFHIKVIDAEPPVIDWCRSPPPVQVSEKVHAASWDEPQFSDNSGAELVITRSHTQGDLFPQGETIVQYTATDPSGNNRTCDIHIVIKGSPCEIPFTPVNGDFICTPDNTGVNCTLTCLEGYDFTEGSTDKYYCAYEDGVWKPTYTTEWPDCAKKRFANHGFKSFEMFYKAARCDDTDLMKKFSEAFETTLGKMVPSFCSDAEDIDCRLEENLTKKYCLEYNYDYENGFAIGPGGWGAANRLDYSYDDFLDTVQETATSIGNAKSSRIKRSAPLSDYKIKLIFNITASVPLPDERNDTLEWENQQRLLQTLETITNKLKRTLNKDPMYSFQLASEILIADSNSLETKKASPFCRPGSVLRGRMCVNCPLGTYYNLEHFTCESCRIGSYQDEEGQLECKLCPSGMYTEYIHSRNISDCKAQCKQGTYSYSGLETCESCPLGTYQPKFGSRSCLSCPENTSTVKRGAVNISACGVPCPEGKFSRSGLMPCHPCPRDYYQPNAGKAFCLACPFYGTTPFAGSRSITECSSFSSTFSAAEESVVPPASLGHIKKRHEISSQVFHECFFNPCHNSGTCQQLGRGYVCLCPLGYTGLKCETDIDECSPLPCLNNGVCKDLVGEFICECPSGYTGQRCEENINECSSSPCLNKGICVDGVAGYRCTCVKGFVGLHCETEVNECQSNPCLNNAVCEDQVGGFLCKCPPGFLGTRCGKNVDECLSQPCKNGATCKDGANSFRCLCAAGFTGSHCELNINECQSNPCRNQATCVDELNSYSCKCQPGFSGKRCETEQSTGFNLDFEVSGIYGYVMLDGMLPSLHALTCTFWMKSSDDMNYGTPISYAVDNGSDNTLLLTDYNGWVLYVNGREKITNCPSVNDGRWHHIAITWTSANGIWKVYIDGKLSDGGAGLSVGLPIPGGGALVLGQEQDKKGEGFSPAESFVGSISQLNLWDYVLSPQQVKSLATSCPEELSKGNVLAWPDFLSGIVGKVKIDSKSIFCSDCPRLGGSVPHLRTASEDLKPGSKVNLFCDPGFQLVGNPVQYCLNQGQWTQPLPHCERISCGVPPPLENGFHSADDFYAGSTVTYQCNNGYYLLGDSRMFCTDNGSWNGVSPSCLDVDECAVGSDCSEHASCLNVDGSYICSCVPPYTGDGKNCAEPIKCKAPGNPENGHSSGEIYTVGAEVTFSCQEGYQLMGVTKITCLESGEWNHLIPYCKAVSCGKPAIPENGCIEELAFTFGSKVTYRCNKGYTLAGDKESSCLANSSWSHSPPVCEPVKCSSPENINNGKYILSGLTYLSTASYSCDTGYSLQGPSIIECTASGIWDRAPPACHLVFCGEPPAIKDAVITGNNFTFRNTVTYTCKEGYTLAGLDTIECLADGKWSRSDQQCLAVSCDEPPIVDHASPETAHRLFGDIAFYYCSDGYSLADNSQLLCNAQGKWVPPEGQDMPRCIAHFCEKPPSVSYSILESVSKAKFAAGSVVSFKCMEGFVLNTSAKIECMRGGQWNPSPMSIQCIPVRCGEPPSIMNGYASGSNYSFGAMVAYSCNKGFYIKGEKKSTCEATGQWSSPIPTCHPVSCGEPPKVENGFLEHTTGRIFESEVRYQCNPGYKSVGSPVFVCQANRHWHSESPLMCVPLDCGKPPPIQNGFMKGENFEVGSKVQFFCNEGYELVGDSSWTCQKSGKWNKKSNPKCMPAKCPEPPLLENQLVLKELTTEVGVVTFSCKEGHVLQGPSVLKCLPSQQWNDSFPVCKIVLCTPPPLISFGVPIPSSALHFGSTVKYSCVGGFFLRGNSTTLCQPDGTWSSPLPECVPVECPQPEEIPNGIIDVQGLAYLSTALYTCKPGFELVGNTTTLCGENGHWLGGKPTCKAIECLKPKEILNGKFSYTDLHYGQTVTYSCNRGFRLEGPSALTCLETGDWDVDAPSCNAIHCDSPQPIENGFVEGADYSYGAIIIYSCFPGFQVAGHAMQTCEESGWSSSIPTCMPIDCGLPPHIDFGDCTKLKDDQGYFEQEDDMMEVPYVTPHPPYHLGAVAKTWENTKESPATHSSNFLYGTMVSYTCNPGYELLGNPVLICQEDGTWNGSAPSCISIECDLPTAPENGFLRFTETSMGSAVQYSCKPGHILAGSDLRLCLENRKWSGASPRCEAISCKKPNPVMNGSIKGSNYTYLSTLYYECDPGYVLNGTERRTCQDDKNWDEDEPICIPVDCSSPPVSANGQVRGDEYTFQKEIEYTCNEGFLLEGARSRVCLANGSWSGATPDCVPVRCATPPQLANGVTEGLDYGFMKEVTFHCHEGYILHGAPKLTCQSDGNWDAEIPLCKPVNCGPPEDLAHGFPNGFSFIHGGHIQYQCFPGYKLHGNSSRRCLSNGSWSGSSPSCLPCRCSTPVIEYGTVNGTDFDCGKAARIQCFKGFKLLGLSEITCEADGQWSSGFPHCEHTSCGSLPMIPNAFISETSSWKENVITYSCRSGYVIQGSSDLICTEKGVWSQPYPVCEPLSCGSPPSVANAVATGEAHTYESEVKLRCLEGYTMDTDTDTFTCQKDGRWFPERISCSPKKCPLPENITHILVHGDDFSVNRQVSVSCAEGYTFEGVNISVCQLDGTWEPPFSDESCSPVSCGKPESPEHGFVVGSKYTFESTIIYQCEPGYELEGNRERVCQENRQWSGGVAICKETRCETPLEFLNGKADIENRTTGPNVVYSCNRGYSLEGPSEAHCTENGTWSHPVPLCKPNPCPVPFVIPENALLSEKEFYVDQNVSIKCREGFLLQGHGIITCNPDETWTQTSAKCEKISCGPPAHVENAIARGVHYQYGDMITYSCYSGYMLEGFLRSVCLENGTWTSPPICRAVCRFPCQNGGICQRPNACSCPEGWMGRLCEEPICILPCLNGGRCVAPYQCDCPPGWTGSRCHTAVCQSPCLNGGKCVRPNRCHCLSSWTGHNCSRKRRTGF

SEQ ID NO: 259 - protein, 3801 aa, Homo sapiens
MSTDSNSLAREFLTDVNRLCNAVVQRVEAREEEEEETHMATLGQYLVHGRGFLLLTKLNSIIDQALTCREELLTLLLSLLPLVWKIPVQEEKATDFNLPLSADIILTKEKNSSSQRSTQEKLHLEGSALSSQVSAKVNVFRKSRRQRKITHRYSVRDARKTQLSTSDSEANSDEKGIAMNKHRRPHLLHHFLTSFPKQDHPKAKLDRLATKEQTPPDAMALENSREIIPRQGSNTDILSEPAALSVISNMNNSPFDLCHVLLSLLEKVCKFDVTLNHNSPLAASVVPTLTEFLAGFGDCCSLSDNLESRVVSAGWTEEPVALIQRMLFRTVLHLLSVDVSTAEMMPENLRKNLTELLRAALKIRICLEKQPDPFAPRQKKTLQEVQEDFVFSKYRHRALLLPELLEGVLQILICCLQSAASNPFYFSQAMDLVQEFIQHHGFNLFETAVLQMEWLVLRDGVPPEASEHLKALINSVMKIMSTVKKVKSEQLHHSMCTRKRHRRCEYSHFMHHHRDLSGLLVSAFKNQVSKNPFEETADGDVYYPERCCCIAVCAHQCLRLLQQASLSSTCVQILSGVHNIGICCCMDPKSVIIPLLHAFKLPALKNFQQHILNILNKLILDQLGGAEISPKIKKAACNICTVDSDQLAQLEETLQGNLCDAELSSSLSSPSYRFQGILPSSGSEDLLWKWDALKAYQNFVFEEDRLHSIQIANHICNLIQKGNIVVQWKLYNYIFNPVLQRGVELAHHCQHLSVTSAQSHVCSHHNQCLPQDVLQIYVKTLPILLKSRVIRDLFLSCNGVSQIIELNCLNGIRSHSLKAFETLIISLGEQQKDASVPDIDGIDIEQKELSSVHVGTSFHHQQAYSDSPQSLSKFYAGLKEAYPKRRKTVNQDVHINTINLFLCVAFLCVSKEAESDRESANDSEDTSGYDSTASEPLSHMLPCISLESLVLPSPEHMHQAADIWSMCRWIYMLSSVFQKQFYRLGGFRVCHKLIFMIIQKLFRSHKEEQGKKEGDTSVNENQDLNRISQPKRTMKEDLLSLAIKSDPIPSELGSLKKSADSLGKLELQHISSINVEEVSATEAAPEEAKLFTSQESETSLQSIRLLEALLAICLHGARTSQQKMELELPNQNLSVESILFEMRDHLSQSKVIETQLAKPLFDALLRVALGNYSADFEHNDAMTEKSHQSAEELSSQPGDFSEEAEDSQCCSFKLLVEEEGYEADSESNPEDGETQDDGVDLKSETEGFSASSSPNDLLENLTQGEIIYPEICMLELNLLSASKAKLDVLAHVFESFLKIIRQKEKNVFLLMQQGTVKNLLGGFLSILTQDDSDFQACQRVLVDLLVSLMSSRTCSEELTLLLRIFLEKSPCTKILLLGILKIIESDTTMSPSQYLTFPLLHAPNLSNGVSSQKYPGILNSKAMGLLRRARVSRSKKEADRESFPHRLLSSWHIAPVHLPLLGQNCWPHLSEGFSVSLWFNVECIHEAESTTEKGKKIKKRNKSLILPDSSFDGTESDRPEGAEYINPGERLIEEGCIHIISLGSKALMIQVWADPHNATLIFRVCMDSNDDMKAVLLAQVESQENIFLPSKWQHLVLTYLQQPQGKRRIHGKISIWVSGQRKPDVTLDFMLPRKTSLSSDSNKTFCMIGHCLSSQEEFLQLAGKWDLGNLLLFNGAKVGSQEAFYLYACGPNHTSVMPCKYGKPVNDYSKYINKEILRCEQIRELFMTKKDVDIGLLIESLSVVYTTYCPAQYTIYEPVIRLKGQMKTQLSQRPFSSKEVQSILLEPHHLKNLQPTEYKTIQGILHEIGGTGIFVFLFARVVELSSCEETQALALRVILSLIKYNQQRVHELENCNGLSMIHQVLIKQKCIVGFYILKTLLEGCCGEDIIYMNENGEFKLDVDSNAIIQDVKLLEELLLDWKIWSKAEQGVWETLLAALEVLIRADHHQQMFNIKQLLKAQVVHHFLLTCQVLQEYKEGQLTPMPREVCRSFVKIIAEVLGSPPDLELLTIIFNFLLAVHPPTNTYVCHNPTNFYFSLHIDGKIFQEKVRSIMYLRHSSSGGRSLMSPGFMVISPSGFTASPYEGENSSNIIPQQMAAHMLRSRSLPAFPTSSLLTQSQKLTGSLGCSIDRLQNIADTYVATQSKKQNSLGSSDTLKKGKEDAFISSCESAKTVCEMEAVLSAQVSVSDVPKGVLGFPVVKADHKQLGAEPRSEDDSPGDESCPRRPDYLKGLASFQRSHSTIASLGLAFPSQNGSAAVGRWPSLVDRNTDDWENFAYSLGYEPNYNRTASAHSVTEDCLVPICCGLYELLSGVLLILPDVLLEDVMDKLIQADTLLVLVNHPSPAIQQGVIKLLDAYFARASKEQKDKFLKNRGFSLLANQLYLHRGTQELLECFIEMFFGRHIGLDEEFDLEDVRNMGLFQKWSVIPILGLIETSLYDNILLHNALLLLLQILNSCSKVADMLLDNGLLYVLCNTVAALNGLEKNIPMSEYKLLACDIQQLFIAVTIHACSSSGSQYFRVIEDLIVMLGYLQNSKNKRTQNMAVALQLRVLQAAMEFIRTTANHDSENLTDSLQSPSAPHHAVVQKRKSIAGPRKFPLAQTESLLMKMRSVANDELHVMMQRRMSQENPSQATETELAQRLQRLTVLAVNRIIYQEFNSDIIDILRTPENVTQSKTSVFQTEISEENIHHEQSSVFNPFQKEIFTYLVEGFKVSIGSSKASGSKQQWTKILWSCKETFRMQLGRLLVHILSPAHAAQERKQIFEIVHEPNHQEILRDCLSPSLQHGAKLVLYLSELIHNHQGELTEEELGTAELLMNALKLCGHKCIPPSASTKADLIKMIKEEQKKYETEEGVNKAAWQKTVNNNQQSLFQRLDSKSKDISKIAADITQAVSLSQGNERKKVIQHIRGMYKVDLSASRHWQELIQQLTHDRAVWYDPIYYPTSWQLDPTEGPNRERRRLQRCYLTIPNKYLLRDRQKSEDVVKPPLSYLFEDKTHSSFSSTVKDKAASESIRVNRRCISVAPSRETAGELLLGKCGMYFVEDNASDTVESSSLQGELEPASFSWTYEEIKEVHKRWWQLRDNAVEIFLTNGRTLLLAFDNTKVRDDVYHNILTNNLPNLLEYGNITALTNLWYTGQITNFEYLTHLNKHAGRSFNDLMQYPVFPFILADYVSETLDLNDLLIYRNLSKPIAVQYKEKEDRYVDTYKYLEEEYRKGAREDDPMPPVQPYHYGSHYSNSGTVLHFLVRMPPFTKMFLAYQDQSFDIPDRTFHSTNTTWRLSSFESMTDVKELIPEFFYLPEFLVNREGFDFGVRQNGERVNHVNLPPWARNDPRLFILIHRQALESDYVSQNICQWIDLVFGYKQKGKASVQAINVFHPATYFGMDVSAVEDPVQRRALETMIKTYGQTPRQLFHMAHVSRPGAKLNIEGELPAAVGLLVQFAFRETREQVKEITYPSPLSWIKGLKWGEYVGSPSAPVPVVCFSQPHGERFGSLQALPTRAICGLSRNFCLLMTYSKEQGVRSMNSTDIQWSAILSWGYADNILRLKSKQSEPPVNFIQSSQQYQVTSCAWVPDSCQLFTGSKCGVITAYTNRFTSSTPSEIEMETQIHLYGHTEEITSLFVCKPYSILISVSRDGTCIIWDLNRLCYVQSLAGHKSPVTAVSASETSGDIATVCDSAGGGSDLRLWTVNGDLVGHVHCREIICSVAFSNQPEGVSINVIAGGLENGIVRLWSTWDLKPVREITFPKSNKPIISLTFSCDGHHLYTANSDGTVIAWCRKDQQRLKQPMFYSFLSSYAAG

SEQ ID NO: 260 - protein, 1745 aa, Homo sapiens
MGNRRDLGQPRAGLCLLLAALQLLPGTQADPVDVLKALGVQGGQAGVPEGPGFCPQRTPEGDRAFRIGQASTLGIPTWELFPEGHFPENFSLLITLRGQPANQSVLLSIYDERGARQLGLALGPALGLLGDPFRPLPQQVNLTDGRWHRVAVSIDGEMVTLVADCEAQPPVLGHGPRFISIAGLTVLGTQDLGEKTFEGDIQELLISPDPQAAFQACERYLPDCDNLAPAATVAPQGEPETPRPRRKGKGKGRKKGRGRKGKGRKKNKEIWTSSPPPDSAENQTSTDIPKTETPAPNLPPTPTPLVVTSTVTTGLNATILERSLDPDSGTELGTLETKAAREDEEGDDSTMGPDFRAAEYPSRTQFQIFPGAGEKGAKGEPAVIEKGQQFEGPPGAPGPQGVVGPSGPPGPPGFPGDPGPPGPAGLPGIPGIDGIRGPPGTVIMMPFQFAGGSFKGPPVSFQQAQAQAVLQQTQLSMKGPPGPVGLTGRPGPVGLPGHPGLKGEEGAEGPQGPRGLQGPHGPPGRVGKMGRPGADGARGLPGDTGPKGDRGFDGLPGLPGEKGQRGDFGHVGQPGPPGEDGERGAEGPPGPTGQAGEPGPRGLLGPRGSPGPTGRPGVTGIDGAPGAKGNVGPPGEPGPPGQQGNHGSQGLPGPQGLIGTPGEKGPPGNPGIPGLPGSDGPLGHPGHEGPTGEKGAQGPPGSAGPPGYPGPRGVKGTSGNRGLQGEKGEKGEDGFPGFKGDVGLKGDQGKPGAPGPRGEDGPEGPKGQAGQAGEEGPPGSAGEKGKLGVPGLPGYPGRPGPKGSIGFPGPLGPIGEKGKSGKTGQPGLEGERGPPGSRGERGQPGATGQPGPKGDVGQDGAPGIPGEKGLPGLQGPPGFPGPKGPPGHQGKDGRPGHPGQRGELGFQGQTGPPGPAGVLGPQGKTGEVGPLGERGPPGPPGPPGEQGLPGLEGREGAKGELGPPGPLGKEGPAGLRGFPGPKGGPGDPGPTGLKGDKGPPGPVGANGSPGERGPLGPAGGIGLPGQSGSEGPVGPAGKKGSRGERGPPGPTGKDGIPGPLGPLGPPGAAGPSGEEGDKGDVGAPGHKGSKGDKGDAGPPGQPGIRGPAGHPGPPGADGAQGRRGPPGLFGQKGDDGVRGFVGVIGPPGLQGLPGPPGEKGEVGDVGSMGPHGAPGPRGPQGPTGSEGTPGLPGGVGQPGAVGEKGERGDAGDPGPPGAPGIPGPKGDIGEKGDSGPSGAAGPPGKKGPPGEDGAKGSVGPTGLPGDLGPPGDPGVSGIDGSPGEKGDPGDVGGPGPPGASGEPGAPGPPGKRGPSGHMGREGREGEKGAKGEPGPDGPPGRTGPMGARGPPGRVGPEGLRGIPGPVGEPGLLGAPGQMGPPGPLGPSGLPGLKGDTGPKGEKGHIGLIGLIGPPGEAGEKGDQGLPGVQGPPGPKGDPGPPGPIGSLGHPGPPGVAGPLGQKGSKGSPGSMGPRGDTGPAGPPGPPGAPAELHGLRRRRRFVPVPLPVVEGGLEEVLASLTSLSLELEQLRRPPGTAERPGLVCHELHRNHPHLPDGEYWIDPNQGCARDSFRVFCNFTAGGETCLYPDKKFEIVKLASWSKEKPGGWYSTFRRGKKFSYVDADGSPVNVVQLNFLKLLSATARQNFTYSCQNAAAWLDEATGDYSHSARFLGTNGEELSFNQTTAATVSVPQDGCRLRKGQTKTLFEFSSSRAGFLPLWDVAATDFGQTNQKFGFELGPVCFSS

SEQ ID NO: 261 - protein, 1907 aa, Homo sapiens
MAAAPGLLVWLLVLRLPWRVPGQLDPSTGRRFSEHKLCADDECSMLMYRGEALEDFTGPDCRFVNFKKGDPVYVYYKLARGWPEVWAGSVGRTFGYFPKDLIQVVHEYTKEELQVPTDETDFVCFDGGRDDFHNYNVEELLGFLELYNSAATDSEKAVEKTLQDMEKNPELSKEREPEPEPVEANSEESDSVFSENTEDLQEQFTTQKHHSHANSQANHAQGEQASFESFEEMLQDKLKVPESENNKTSNSSQVSNEQDKIDAYKLLKKEMTLDLKTKFGSTADALVSDDETTRLVTSLEDDFDEELDTEYYAVGKEDEENQEDFDELPLLTFTDGEDMKTPAKSGVEKYPTDKEQNSNEEDKVQLTVPPGIKNDDKNILTTWGDTIFSIVTGGEETRDTMDLESSSSEEEKEDDDDALVPDSKQGKPQSATDYSDPDNVDDGLFIVDIPKTNNDKEVNAEHHIKGKGRGVQESKRGLVQDKTELEDENQEGMTVHSSVHSNNLNSMPAAEKGKDTLKSAYDDTENDLKGAAIHISKGMLHEEKPGEQILEGGSESESAQKAAGNQMNDRKIQQESLGSAPLMGDDHPNASRDSVEGDALVNGAKLHTLSVEHQREELKEELVLKTQNQPRFSSPDEIDLPRELEDEVPILGRNLPWQQERDVAATASKQMSEKIRLSEGEAKEDSLDEEFFHHKAMQGTEVGQTDQTDSTGGPAFLSKVEEDDYPSEELLEDENAINAKRSKEKNPGNQGRQFDVNLQVPDRAVLGTIHPDPEIEESKQETSMILDSEKTSETAAKGVNTGGREPNTMVEKERPLADKKAQRPFERSDFSDSIKIQTPELGEVFQNKDSDYLKNDNPEEHLKTSGLAGEPEGELSKEDHENTEKYMGTESQGSAAAEPEDDSFHWTPHTSVEPGHSDKREDLLIISSFFKEQQSLQRFQKYFNVHELEALLQEMSSKLKSAQQESLPYNMEKVLDKVFRASESQILSIAEKMLDTRVAENRDLGMNENNIFEEAAVLDDIQDLIYFVRYKHSTAEETATLVMAPPLEEGLGGAMEEMQPLHEDNFSREKTAELNVQVPEEPTHLDQRVIGDTHASEVSQKPNTEKDLDPGPVTTEDTPMDAIDANKQPETAAEEPASVTPLENAILLIYSFMFYLTKSLVATLPDDVQPGPDFYGLPWKPVFITAFLGIASFAIFLWRTVLVVKDRVYQVTEQQISEKLKTIMKENTELVQKLSNYEQKIKESKKHVQETRKQNMILSDEAIKYKDKIKTLEKNQEILDDTAKNLRVMLESEREQNVKNQDLISENKKSIEKLKDVISMNASEFSEVQIALNEAKLSEEKVKSECHRVQEENARLKKKKEQLQQEIEDWSKLHAELSEQIKSFEKSQKDLEVALTHKDDNINALTNCITQLNLLECESESEGQNKGGNDSDELANGEVGGDRNEKMKNQIKQMMDVSRTQTAISVVEEDLKLLQLKLRASVSTKCNLEDQVKKLEDDRNSLQAAKAGLEDECKTLRQKVEILNELYQQKEMALQKKLSQEEYERQEREHRLSAADEKAVSAAEEVKTYKRRIEEMEDELQKTERSFKNQIATHEKKAHENWLKARAAERAIAEEKREAANLRHKLLELTQKMAMLQEEPVIVKPMPGKPNTQNPPRRGPLSQNGSFGPSPVSGGECSPPLTVEPPVRPLSATLNRRDMPRSEFGSVDGPLPHPRWSAEASGKPSPSDPGSGTATMMNSSSRGSSPTRVLDEGKVNMAPKGPPPFPGVPLMSTPMGGPVPPPIRYGPPPQLCGPFGPRPLPPPFGPGMRPPLGLREFAPGVPPGRRDLPLHPRGFLPGHAPFRPLGSLGPREYFIPGTRLPPPTHGPQEYPPPPAVRDLLPSGSRDEPPPASQSTSQDCSQALKQSP

SEQ ID NO: 262 - protein, 2285 aa, Homo sapiens
MAAQVAPAAASSLGNPPPPPPSELKKAEQQQREEAGGEAAAAAAAERGEMKAAAGQESEGPAVGPPQPLGKELQDGAESNGGGGGGGAGSGGGPGAEPDLKNSNGNAGPRPALNNNLTEPPGGGGGGSSDGVGAPPHSAAAALPPPAYGFGQPYGRSPSAVAAAAAAVFHQQHGGQQSPGLAALQSGGGGGLEPYAGPQQNSHDHGFPNHQYNSYYPNRSAYPPPAPAYALSSPRGGTPGSGAAAAAGSKPPPSSSASASSSSSSFAQQRFGAMGGGGPSAAGGGTPQPTATPTLNQLLTSPSSARGYQGYPGGDYSGGPQDGGAGKGPADMASQCWGAAAAAAAAAAASGGAQQRSHHAPMSPGSSGGGGQPLARTPQPSSPMDQMGKMRPQPYGGTNPYSQQQGPPSGPQQGHGYPGQPYGSQTPQRYPMTMQGRAQSAMGGLSYTQQIPPYGQQGPSGYGQQGQTPYYNQQSPHPQQQQPPYSQQPPSQTPHAQPSYQQQPQSQPPQLQSSQPPYSQQPSQPPHQQSPAPYPSQQSTTQQHPQSQPPYSQPQAQSPYQQQQPQQPAPSTLSQQAAYPQPQSQQSQQTAYSQQRFPPPQELSQDSFGSQASSAPSMTSSKGGQEDMNLSLQSRPSSLPDLSGSIDDLPMGTEGALSPGVSTSGISSSQGEQSNPAQSPFSPHTSPHLPGIRGPSPSPVGSPASVAQSRSGPLSPAAVPGNQMPPRPPSGQSDSIMHPSMNQSSIAQDRGYMQRNPQMPQYSSPQPGSALSPRQPSGGQIHTGMGSYQQNSMGSYGPQGGQYGPQGGYPRQPNYNALPNANYPSAGMAGGINPMGAGGQMHGQPGIPPYGTLPPGRMSHASMGNRPYGPNMANMPPQVGSGMCPPPGGMNRKTQETAVAMHVAANSIQNRPPGYPNMNQGGMMGTGPPYGQGINSMAGMINPQGPPYSMGGTMANNSAGMAASPEMMGLGDVKLTPATKMNNKADGTPKTESKSKKSSSSTTTNEKITKLYELGGEPERKMWVDRYLAFTEEKAMGMTNLPAVGRKPLDLYRLYVSVKEIGGLTQVNKNKKWRELATNLNVGTSSSAASSLKKQYIQCLYAFECKIERGEDPPPDIFAAADSKKSQPKIQPPSPAGSGSMQGPQTPQSTSSSMAEGGDLKPPTPASTPHSQIPPLPGMSRSNSVGIQDAFNDGSDSTFQKRNSMTPNPGYQPSMNTSDMMGRMSYEPNKDPYGSMRKAPGSDPFMSSGQGPNGGMGDPYSRAAGPGLGNVAMGPRQHYPYGGPYDRVRTEPGIGPEGNMSTGAPQPNLMPSNPDSGMYSPSRYPPQQQQQQQQRHDSYGNQFSTQGTPSGSPFPSQQTTMYQQQQQNYKRPMDGTYGPPAKRHEGEMYSVPYSTGQGQPQQQQLPPAQPQPASQQQAAQPSPQQDVYNQYGNAYPATATAATERRPAGGPQNQFPFQFGRDRVSAPPGTNAQQNMPPQMMGGPIQASAEVAQQGTMWQGRNDMTYNYANRQSTGSAPQGPAYHGVNRTDEMLHTDQRANHEGSWPSHGTRQPPYGPSAPVPPMTRPPPSNYQPPPSMQNHIPQVSSPAPLPRPMENRTSPSKSPFLHSGMKMQKAGPPVPASHIAPAPVQPPMIRRDITFPPGSVEATQPVLKQRRRLTMKDIGTPEAWRVMMSLKSGLLAESTWALDTINILLYDDNSIMTFNLSQLPGLLELLVEYFRRCLIEIFGILKEYEVGDPGQRTLLDPGRFSKVSSPAPMEGGEEEEELLGPKLEEEEEEEVVENDEEIAFSGKDKPASENSEEKLISKFDKLPVKIVQKNDPFVVDCSDKLGRVQEFDSGLLHWRIGGGDTTEHIQTHFESKTELLPSRPHAPCPPAPRKHVTTAEGTPGTTDQEGPPPDGPPEKRITATMDDMLSTRSSTLTEDGAKSSEAIKESSKFPFGISPAQSHRNIKILEDEPHSKDETPLCTLLDWQDSLAKRCVCVSNTIRSLSFVPGNDFEMSKHPGLLLILGKLILLHHKHPERKQAPLTYEKEEEQDQGVSCNKVEWWWDCLEMLRENTLVTLANISGQLDLSPYPESICLPVLDGLLHWAVCPSAEAQDPFSTLGPNAVLSPQRLVLETLSKLSIQDNNVDLILATPPFSRLEKLYSTMVRFLSDRKNPVCREMAVVLLANLAQGDSLAARAIAVQKGSIGNLLGFLEDSLAATQFQQSQASLLHMQNPPFEPTSVDMMRRAARALLALAKVDENHSEFTLYESRLLDISVSPLMNSLVSQVICDVLFLIGQS

SEQ ID NO: 263 - protein, 2539 aa, Homo sapiens
MNHPFGKEEAASQKQLFGFFCECLRRGEWELAQACVPQLQEGQGDIPKRVEDILQALVVCPNLLRCGQDINPQRVAWVWLLVLEKWLAREKKLLPVVFRRKLEFLLLSEDLQGDIPENILEELYETLTQGAVGHVPDGNPRRESWTPRLSSEAVSVLWDLLRQSPQPAQALLELLLEEDDGTGLCHWPLQNALVDLIRKALRALQGPDSVPPGVVDAIYGALRTLRCPAEPLGVELHLLCEELLEACRTEGSPLREERLLSCLLHKASRGLLSLYGHTYAEKVTEKPPRATASGKVSPDHLDPERAMLALFSNPNPAEAWKVAYFYCLSNNKHFLEQILVTALTLLKEEDFPNLGCLLDREFRPLSCLLVLLGWTHCQSLESAKRLLQTLHRTQGPGCDELLRDACDGLWAHLEVLEWCIQQSSNPIPKRDLLYHLHGGDSHSVLYTLHHLTNLPALREEDVLKLLQKVPAKDPQQEPDAVDAPVPEHLSQCQNLTLYQGFCAMKYAIYALCVNSHQHSQCQDCKDSLSEDLASATEPANDSLSSPGAANLFSTYLARCQQYLCSIPDSLCLELLENIFSLLLITSADLHPEPHLPEDYAEDDDIEGKSPSGLRSPSESPQHIAHPERKSERGSLGVPKTLAYTMPSHVKAEPKDSYPGPHRHSFLDLKHFTSGISGFLADEFAIGAFLRLLQEQLDEISSRSPPEKPKQESQSCSGSRDGLQSRLHRLSKVVSEAQWRHKVVTSNHRSEEQPSRRYQPATRHPSLRRGRRTRRSQADGRDRGSNPSLESTSSELSTSTSEGSLSAMSGRNELHSRLHPHPQSSLIPMMFSPPESLLASCILRGNFAEAHQVLFTFNLKSSPSSGELMFMERYQEVIQELAQVEHKIENQNSDAGSSTIRRTGSGRSTLQAIGSAAAAGMVFYSISDVTDKLLNTSGDPIPMLQEDFWISTALVEPTAPLREVLEDLSPPAMAAFDLACSQCQLWKTCKQLLETAERRLNSSLERRGRRIDHVLLNADGIRGFPVVLQQISKSLNYLLMSASQTKSESVEEKGGGPPRCSITELLQMCWPSLSEDCVASHTTLSQQLDQVLQSLREALELPEPRTPPLSSLVEQAAQKAPEAEAHPVQIQTQLLQKNLGKQTPSGSRQMDYLGTFFSYCSTLAAVLLQSLSSEPDHVEVKVGNPFVLLQQSSSQLVSHLLFERQVPPERLAALLAQENLSLSVPQVIVSCCCEPLALCSSRQSQQTSSLLTRLGTLAQLHASHCLDDLPLSTPSSPRTTENPTLERKPYSSPRDSSLPALTSSALAFLKSRSKLLATVACLGASPRLKVSKPSLSWKELRGRREVPLAAEQVARECERLLEQFPLFEAFLLAAWEPLRGSLQQGQSLAVNLCGWASLSTVLLGLHSPIALDVLSEAFEESLVARDWSRALQLTEVYGRDVDDLSSIKDAVLSCAVACDKEGWQYLFPVKDASLRSRLALQFVDRWPLESCLEILAYCISDTAVQEGLKCELQRKLAELQVYQKILGLQSPPVWCDWQTLRSCCVEDPSTVMNMILEAQEYELCEEWGCLYPIPREHLISLHQKHLLHLLERRDHDKALQLLRRIPDPTMCLEVTEQSLDQHTSLATSHFLANYLTTHFYGQLTAVRHREIQALYVGSKILLTLPEQHRASYSHLSSNPLFMLEQLLMNMKVDWATVAVQTLQQLLVGQEIGFTMDEVDSLLSRYAEKALDFPYPQREKRSDSVIHLQEIVHQAADPETLPRSPSAEFSPAAPPGISSIHSPSLRERSFPPTQPSQEFVPPATPPARHQWVPDETESICMVCCREHFTMFNRRHHCRRCGRLVCSSCSTKKMVVEGCRENPARVCDQCYSYCNKDVPEEPSEKPEALDSSKNESPPYSFVVRVPKADEVEWILDLKEEENELVRSEFYYEQAPSASLCIAILNLHRDSIACGHQLIEHCCRLSKGLTNPEVDAGLLTDIMKQLLFSAKMMFVKAGQSQDLALCDSYISKVDVLNILVAAAYRHVPSLDQILQPAAVTRLRNQLLEAEYYQLGVEVSTKTGLDTTGAWHAWGMACLKAGNLTAAREKFSRCLKPPFDLNQLNHGSRLVQDVVEYLESTVRPFVSLQDDDYFATLRELEATLRTQSLSLAVIPEGKIMNNTYYQECLFYLHNYSTNLAIISFYVRHSCLREALLHLLNKESPPEVFIEGIFQPSYKSGKLHTLENLLESIDPTLESWGKYLIAACQHLQKKNYYHILYELQQFMKDQVRAAMTCIRFFSHKAKSYTELGEKLSWLLKAKDHLKIYLQETSRSSGRKKTTFFRKKMTAADVSRHMNTLQLQMEVTRFLHRCESAGTSQITTLPLPTLFGNNHMKMDVACKVMLGGKNVEDGFGIAFRVLQDFQLDAAMTYCRAARQLVEKEKYSEIQQLLKCVSESGMAAKSDGDTILLNCLEAFKRIPPQELEGLIQAIHNDDNKVRAYLICCKLRSAYLIAVKQEHSRATALVQQVQQAAKSSGDAVVQDICAQWLLTSHPRGAHGPGSRK

SEQ ID NO: 264 - protein, 4349 aa, Homo sapiens
MTIALLGFAIFLLHCATCEKPLEGILSSSAWHFTHSHYNATIYENSSPKTYVESFEKMGIYLAEPQWAVRYRIISGDVANVFKTEEYVVGNFCFLRIRTKSSNTALLNREVRDSYTLIIQATEKTLELEALTRVVVHILDQNDLKPLFSPPSYRVTISEDMPLKSPICKVTATDADLGQNAEFYYAFNTRSEMFAIHPTSGVVTVAGKLNVTWRGKHELQVLAVDRMRKISEGNGFGSLAALVVHVEPALRKPPAIASVVVTPPDSNDGTTYATVLVDANSSGAEVESVEVVGGDPGKHFKAIKSYARSNEFSLVSVKDINWMEYLHGFNLSLQARSGSGPYFYSQIRGFHLPPSKLSSLKFEKAVYRVQLSEFSPPGSRVVMVRVTPAFPNLQYVLKPSSENVGFKLNARTGLITTTKLMDFHDRAHYQLHIRTSPGQASTVVVIDIVDCNNHAPLFNRSSYDGTLDENIPPGTSVLAVTATDRDHGENGYVTYSIAGPKALPFSIDPYLGIISTSKPMDYELMKRIYTFRVRASDWGSPFRREKEVSIFLQLRNLNDNQPMFEEVNCTGSIRQDWPVGKSIMTMSAIDVDELQNLKYEIVSGNELEYFDLNHFSGVISLKRPFINLTAGQPTSYSLKITASDGKNYASPTTLNITVVKDPHFEVPVTCDKTGVLTQFTKTILHFIGLQNQESSDEEFTSLSTYQINHYTPQFEDHFPQSIDVLESVPINTPLARLAATDPDAGFNGKLVYVIADGNEEGCFDIELETGLLTVAAPLDYEATNFYILNVTVYDLGTPQKSSWKLLTVNVKDWNDNAPRFPPGGYQLTISEDTEVGTTIAELTTKDADSEDNGRVRYTLLSPTEKFSLHPLTGELVVTGHLDRESEPRYILKVEARDQPSKGHQLFSVTDLIITLEDVNDNSPQCITEHNRLKVPEDLPPGTVLTFLDASDPDLGPAGEVRYVLMDGAHGTFRVDLMTGALILERELDFERRAGYNLSLWASDGGRPLARRTLCHVEVIVLDVNENLHPPHFASFVHQGQVQENSPSGTQVIVVAAQDDDSGLDGELQYFLRAGTGLAAFSINQDTGMIQTLAPLDREFASYYWLTVLAVDRGSVPLSSVTEVYIEVTDANDNPPQMSQAVFYPSIQEDAPVGTSVLQLDAWDPDSSSKGKLTFNITSGNYMGFFMIHPVTGLLSTAQQLDRENKDEHILEVTVLDNGEPSLKSTSRVVVGILDVNDNPPIFSHKLFNVRLPERLSPVSPGPVYRLVASDLDEGLNGRVTYSIEDSDEEAFSIDLVTGVVSSSSTFTAGEYNILTIKATDSGQPPLSASVRLHIEWIPWPRPSSIPLAFDETYYSFTVMETDPVNHMVGVISVEGRPGLFWFNISGGDKDMDFDIEKTTGSIVIARPLDTRRRSNYNLTVEVTDGSRTIATQVHIFMIANINHHRPQFLETRYEVRVPQDTVPGVELLRVQAIDQDKGKSLIYTIHGSQDPGSASLFQLDPSSGVLVTVGKLDLGSGPSQHTLTVMVRDQEIPIKRNFVWVTIHVEDGNLHPPRFTQLHYEASVPDTIAPGTELLQVRAMDADRGVNAEVHYSLLKGNSEGFFNINALLGIITLAQKLDQANHAPHTLTVKAEDQGSPQWHDLATVIIHVYPSDRSAPIFSKSEYFVEIPESIPVGSPILLVSAMSPSEVTYELREGNKDGVFSMNSYSGLISTQKKLDHEKISSYQLKIRGSNMAGAFTDVMVVVDIIDENDNAPMFLKSTFVGQISEAAPLYSMIMDKNNNPFVIHASDSDKEANSLLVYKILEPEALKFFKIDPSMGTLTIVSEMDYESMPSFQFCVYVHDQGSPVLFAPRPAQVIIHVRDVNDSPPRFSEQIYEVAIVGPIHPGMELLMVRASDEDSEVNYSIKTGNADEAVTIHPVTGSISVLNPAFLGLSRKLTIRASDGLYQDTALVKISLTQVLDKSLQFDQDVYWAAVKENLQDRKALVILGAQGNHLNDTLSYFLLNGTDMFHMVQSAGVLQTRGVAFDREQQDTHELAVEVRDNRTPQRVAQGLVRVSIEDVNDNPPKFKHLPYYTIIQDGTEPGDVLFQVSATDEDLGTNGAVTYEFAEDYTYFRIDPYLGDISLKKPFDYQALNKYHLKVIARDGGTPSLQSEEEVLVTVRNKSNPLFQSPYYKVRVPENITLYTPILHTQARSPEGLRLIYNIVEEEPLMLFTTDFKTGVLTVTGPLDYESKTKHVFTVRATDTALGSFSEATVEVLVEDVNDNPPTFSQLVYTTSISEGLPAQTPVIQLLASDQDSGRNRDVSYQIVEDGSDVSKFFQINGSTGEMSTVQELDYEAQQHFHVKVRAMDKGDPPLTGETLVVVNVSDINDNPPEFRQPQYEANVSELATCGHLVLKVQAIDPDSRDTSRLEYLILSGNQDRHFFINSSSGIISMFNLCKKHLDSSYNLRVGASDGVFRATVPVYINTTNANKYSPEFQQHLYEAELAENAMVGTKVIDLLAIDKDSGPYGTIDYTIINKLASEKFSINPNGQIATLQKLDRENSTERVIAIKVMARDGGGRVAFCTVKIILTDENDNPPQFKASEYTVSIQSNVSKDSPVIQVLAYDADEGQNADVTYSVNPEDLVKDVIEINPVTGVVKVKDSLVGLENQTLDFFIKAQDGGPPHWNSLVPVRLQVVPKKVSLPKFSEPLYTFSAPEDLPEGSEIGIVKAVAAQDPVIYSLVRGTTPESNKDGVFSLDPDTGVIKVRKPMDHESTKLYQIDVMAHCLQNTDVVSLVSVNIQVGDVNDNRPVFEADPYKAVLTENMPVGTSVIQVTAIDKDTGRDGQVSYRLSADPGSNVHELFAIDSESGWITTLQELDCETCQTYHFHVVAYDHGQTIQLSSQALVQVSITDENDNAPRFASEEYRGSVVENSEPGELVATLKTLDADISEQNRQVTCYITEGDPLGQFGISQVGDEWRISSRKTLDREHTAKYLLRVTASDGKFQASVTVEIFVLDVNDNSPQCSQLLYTGKVHEDVFPGHFILKVSATDLDTDTNAQITYSLHGPGAHEFKLDPHTGELTTLTALDRERKDVFNLVAKATDGGGRSCQADITLHVEDVNDNAPRFFPSHCAVAVFDNTTVKTPVAVVFARDPDQGANAQVVYSLPDSAEGHFSIDATTGVIRLEKPLQVRPQAPLELTVRASDLGTPIPLSTLGTVTVSVVGLEDYLPVFLNTEHSVQVPEDAPPGTEVLQLATLTRPGAEKTGYRVVSGNEQGRFRLDARTGILYVNASLDFETSPKYFLSIECSRKSSSSLSDVTTVMVNITDVNEHRPQFPQDPYSTRVLENALVGDVILTVSATDEDGPLNSDITYSLIGGNQLGHFTIHPKKGELQVAKALDREQASSYSLKLRATDSGQPPLHEDTDIAIQVADVNDNPPRFFQLNYSTTVQENSPIGSKVLQLILSDPDSPENGPPYSFRITKGNNGSAFRVTPDGWLVTAEGLSRRAQEWYQLQIQASDSGIPPLSSLTSVRVHVTEQSHYAPSALPLEIFITVGEDEFQGGMVGKIHATDRDPQDTLTYSLAEEETLGRHFSVGAPDGKIIAAQGLPRGHYSFNVTVSDGTFTTTAGVHVYVWHVGQEALQQAMWMGFYQLTPEELVSDHWRNLQRFLSHKLDIKRANIHLASLQPAEAVAGVDVLLVFEGHSGTFYEFQELASIITHSAKEMEHSVGVQMRSAMPMVPCQGPTCQGQICHNTVHLDPKVGPTYSTARLSILTPRHHLQRSCSCNGTATRFSGQSYVRYRAPAARNWHIHFYLKTLQPQAILLFTNETASVSLKLASGVPQLEYHCLGGFYGNLSSQRHVNDHEWHSILVEEMDASIRLMVDSMGNTSLVVPENCRGLRPERHLLLGGLILLHSSSNVSQGFEGCLDAVVVNEEALDLLAPGKTVAGLLETQALTQCCLHSDYCSQNTCLNGGKCSWTHGAGYVCKCPPQFSGKHCEQGRENCTFAPCLEGGTCILSPKGASCNCPHPYTGDRCEMEARGCSEGHCLVTPEIQRGDWGQQELLIITVAVAFIIISTVGLLFYCRRCKSHKPVAMEDPDLLARSVGVDTQAMPAIELNPLSASSCNNLNQPEPSKASVPNELVTFGPNSKQRPVVCSVPPRLPPAAVPSHSDNEPVIKRTWSSEEMVYPGGAMVWPPTYSRNERWEYPHSEVTQGPLPPSAHRHSTPVVMPEPNGLYGGFPFPLEMENKRAPLPPRYSNQNLEDLMPSRPPSPRERLVAPCLNEYTAISYYHSQFRQGGGGPCLADGGYKGVGMRLSRAGPSYAVCEVEGAPLAGQGQPRVPPNYEGSDMVESDYGSCEEVMF

SEQ ID NO: 265 - protein, 4116 aa, Homo sapiens
MGATGRLELTLAAPPHPGPAFQRSKARETQGEEEGSEMQIAKSDSIHHMSHSQGQPELPPLPASANEEPSGLYQTVMSHSFYPPLMQRTSWTLAAPFKEQHHHRGPSDSIANNYSLMAQDLKLKDLLKVYQPATISVPRDRTGQGLPSSGNRSSSEPMRKKTKFSSRNKEDSTRIKLAFKTSIFSPMKKEVKTSLTFPGSRPMSPEQQLDVMLQQEMEMESKEKKPSESDLERYYYYLTNGIRKDMIAPEEGEVMVRISKLISNTLLTSPFLEPLMVVLVQEKENDYYCSLMKSIVDYILMDPMERKRLFIESIPRLFPQRVIRAPVPWHSVYRSAKKWNEEHLHTVNPMMLRLKELWFAEFRDLRFVRTAEILAGKLPLQPQEFWDVIQKHCLEAHQTLLNKWIPTCAQLFTSRKEHWIHFAPKSNYDSSRNIEEYFASVASFMSLQLRELVIKSLEDLVSLFMIHKDGNDFKEPYQEMKFFIPQLIMIKLEVSEPIIVFNPSFDGCWELIRDSFLEIIKNSNGIPKLKYIPLKFSFTAAAADRQCVKAAEPGEPSMHAAATAMAELKGYNLLLGTVNAEEKLVSDFLIQTFKVFQKNQVGPCKYLNVYKKYVDLLDNTAEQNIAAFLKENHDIDDFVTKINAIKKRRNEIASMNITVPLAMFCLDATALNHDLCERAQNLKDHLIQFQVDVNRDTNTSICNQYSHIADKVSEVPANTKELVSLIEFLKKSSAVTVFKLRRQLRDASERLEFLMDYADLPYQIEDIFDNSRNLLLHKRDQAEMDLIKRCSEFELRLEGYHRELESFRKREVMTTEEMKHNVEKLNELSKNLNRAFAEFELINKEEELLEKEKSTYPLLQAMLKNKVPYEQLWSTAYEFSIKSEEWMNGPLFLLNAEQIAEEIGNMWRTTYKLIKTLSDVPAPRRLAENVKIKIDKFKQYIPILSISCNPGMKDRHWQQISEIVGYEIKPTETTCLSNMLEFGFGKFVEKLEPIGAAASKEYSLEKNLDRMKLDWVNVTFSFVKYRDTDTNILCAIDDIQMLLDDHVIKTQTMCGSPFIKPIEAECRKWEEKLIRIQDNLDAWLKCQATWLYLEPIFSSEDIIAQMPEEGRKFGIVDSYWKSLMSQAVKDNRILVAADQPRMAEKLQEANFLLEDIQKGLNDYLEKKRLFFPRFFFLSNDELLEILSETKDPLRVQPHLKKCFEGIAKLEFTDNLEIVGMISSEKETVPFIQKIYPANAKGMVEKWLQQVEQMMLASMREVIGLGIEAYVKVPRNHWVLQWPGQVVICVSSIFWTQEVSQALAENTLLDFLKKSNDQIAQIVQLVRGKLSSGARLTLGALTVIDVHARDVVAKLSEDRVSDLNDFQWISQLRYYWVAKDVQVQIITTEALYGYEYLGNSPRLVITPLTDRCYRTLMGALKLNLGGAPEGPAGTGKTETTKDLAKALAKQCVVFNCSDGLDYKAMGKFFKGLAQAGAWACFDEFNRIEVEVLSVVAQQILSIQQAIIRKLKTFIFEGTELSLNPTCAVFITMNPGYAGRAELPDNLKALFRTVAMMVPDYALIGEISLYSMGFLDSRSLAQKIVATYRLCSEQLSSQHHYDYGMRAVKSVLTAAGNLKLKYPEENESVLLLRALLDVNLAKFLAQDVPLFQGIISDLFPGVVLPKPDYEVFLKVLNDNIKKMKLQPVPWFIGKIIQIYEMMLVRHGYMIVGDPMGGKTSAYKVLAAALGDLHAANQMEEFAVEYKIINPKAITMGQLYGCFDQVSHEWMDGVLANAFREQASSLSDDRKWIIFDGPVDAIWIENMNTVLDDNKKLCLMSGEIIQMNSKMSLIFEPADLEQASPATVSRCGMIYMEPHQLGWKPLKDSYMDTLPSSLTKEHKELVNDMFMWLVQPCLEFGRLHCKFVVQTSPIHLAFSMMRLYSSLLDEIRAVEEEEMELGEGLSSQQIFLWLQGLFLFSLVWTVAGTINADSRKKFDVFFRNLIMGMDDNHPRPKSVKLTKNNIFPERGSIYDFYFIKQASGHWETWTQYITKEEEKVPAGAKVSELIIPTMETARQSFFLKTYLDHEIPMLFVGPTGTGKSAITNNFLLHLPKNTYLPNCINFSARTSANQTQDIIMSKLDRRRKGLFGPPIGKKAVVFVDDLNMPAKEVYGAQPPIELLRQWIDHGYWFDKKDTTRLDIVDMLLVTAMGPPGGGRNDITGRFTRHLNIISINAFEDDILTKIFSSIVDWHFGKGFDVMFLRYGKMLVQATKTIYRDAVENFLPTPSKSHYVFNLRDFSRVIQGVLLCPHTHLQDVEKCIRLWIHEVYRVFYDRLIDKEDRQVFFNMVKETTSNCFKQTIEKVLIHLSPTGKIVDDNIRSLFFGDYFKPESDQKIYDEITDLKQLTVVMEHYLEEFNNISKAPMSLVMFRFAIEHISRICRVLKQDKGHLLLVGIGGSGRQSAAKLSTFMNAYELYQIEITKNYAGNDWREDLKKIILQVGVATKSTVFLFADNQIKDESFVEDINMLLNTGDVPNIFPADEKADIVEKMQTAARTQGEKVEVTPLSMYNFFIERVINKISFSLAMSPIGDAFRNRLRMFPSLINCCTIDWFQSWPTDALELVANKFLEDVELDDNIRVEVVSMCKYFQESVKKLSLDYYNKLRRHNYVTPTSYLELILTFKTLLNSKRQEVAMMRNRYLTGLQKLDFAASQVAVMQRELTALQPQLILTSEETAKMMVKIEAETREADGKKLLVQADEKEANVAAAIAQGIKNECEGDLAEAMPALEAALAALDTLNPADISLVKSMQNPPGPVKLVMESICIMKGMKPERKPDPSGSGKMIEDYWGVSKKILGDLKFLESLKTYDKDNIPPLTMKRIRERFINHPEFQPAVIKNVSSACEGLCKWVRAMEVYDRVAKVVAPKRERLREAEGKLAAQMQKLNQKRAELKLVVDRLQALNDDFEEMNTKKKDLEENIEICSQKLVRAEKLISGLGGEKDRWTEAARQLGIRYTNLTGDVLLSSGTVAYLGAFTVDYRVQCQNQWLAECKDKVIPGFSDFSLSHTLGDPIKIRAWQIAGLPVDSFSIDNGIIVSNSRRWALMIDPHGQANKWIKNMEKANKLAVIKFSDSNYMRMLENALQLGTPVLIENIGEELDASIEPILLKATFKQQGVEYMRLGENIIEYSRDFKLYITTRLRNPHYLPEVAVKVCLLNFMITPLGLQDQLLGIVAAKEKPELEEKKNQLIVESAKNKKHLKEIEDKILEVLSMSKGNILEDETAIKVLSSSKVLSEEISEKQKVASMTETQIDETRMGYKPVAVHSATIFFCISDLANIEPMYQYSLTWFINLYMHSLTHSTKSEELNLRIKYIIDHFTLSIYNNVCRSLFEKDKLLFSLLLTIGIMKQKKEITEEVWYFLLTGGIALDNPYPNPAPQWLSEKAWAEIVRASALPKLHGLMEHLEQNLGEWKLIYDSAWPHEEQLPGSWKFSQGLEKMVILRCLRPDKMVPAVREFIAEHMGKLYIEAPTFDLQGSYNDSSCCAPLIFVLSPSADPMAGLLKFADDLGMGGTRTQTISLGQGQGPIAAKMINNAIKDGTWVVLQNCHLAASWMPTLEKICEEVIVPESTNARFRLWLTSYPSEKFPVSILQNGIKMTNEPPKGLRANLLRSYLNDPISDPVFFQSCAKAVMWQKMLFGLCFFHAVVQERRNFGPLGWNIPYEFNESDLRISMWQIQMFLNDYKEVPFDALTYLTGECNYGGRVTDDKDRRLLLSLLSMFYCKEIEEDYYSLAPGDTYYIPPHGSYQSYIDYLRNLPITAHPEVFGLHENADITKDNQETNQLFEGVLLTLPRQSGGSGKSPQEVVEELAQDILSKLPRDFDLEEVMKLYPVVYEESMNTVLRQELIRFNRLTKVVRRSLINLGRAIKGQVLMSSELEEVFNSMLVGKVPAMWAAKSYPSLKPLGGYVADLLARLTFFQEWIDKGPPVVFWISGFYFTQSFLTGVSQNYARKYTIPIDHIGFEFEVTPQETVMENNPEDGAYIKGLFLEGARWDRKTMQIGESLPKILYDPLPIIWLKPGESAMFLHQDIYVCPVYKTSARRGTLSTTGHSTNYVLSIELPTDMPQKHWINRGVASLCQLDN

SEQ ID NO: 266 - protein, 1858 aa, Homo sapiens
MEIDQCLLESLPLGQRQRLVKRMRCEQIKAYYEREKAFQKQEGFLKRLKHAKNPKVHFNLTDMLQDAIIHHNDKEVLRLLKEGADPHTLVSSGGSLLHLCARYDNAFIAEILIDRGVNVNHQDEDFWTPMHIACACDNPDIVLLLVLAGANVLLQDVNGNIPLDYAVEGTESSSILLTYLDENGVDLTSLRQMKLQRPMSMLTDVKHFLSSGGNVNEKNDEGVTLLHMACASGYKEVVSLILEHGGDLNIVDDQYWTPLHLAAKYGQTNLVKLLLMHQANPHLVNCNEEKASDIAASEFIEEMLLKAEIAWEEKMKEPLSASTLAQEEPYEEIIHDLPVLSSKLSPLVLPIAKQDSLLEKDIMFKDATKGLCKQQSQDSIPENPMMSGSTKPEQVKLMPPAPNDDLATLSELNDGSLLYEIQKRFGNNQIYTFIGDILLLVNPYKELPIYSSMVSQLYFSSSGKLCSSLPPHLFSCVERAFHQLFREQRPQCFILSGERGSGKSEASKQIIRHLTCRAGASRATLDSRFKHVVCILEAFGHAKTTLNDLSSCFIKYFELQFCERKQQLTGARIYTYLLEKSRLVSQPLGQSNFLIFYLLMDGLSAEEKYGLHLNNLCAHRYLNQTIQDDASTGERSLNREKLAVLKRALNVVGFSSLEVENLFVILAAILHLGDIRFTALNEGNSAFVSDLQLLEQVAGMLQVSTDELASALTTDIQYFKGDMIIRRHTIQIAEFFRDLLAKSLYSRLFSFLVNTMNSCLHSQDEQKSMQTLDIGILDIFGFEEFQKNEFEQLCVNMTNEKMHHYINEVLFLHEQVECVQEGVTMETAYSPGNQNGVLDFFFQKPSGFLTLLDEESQMIWSVESNFPKKLQSLLESSNTNAVYSPMKDGNGNVALKDHGTAFTIMHYAGRVMYDVVGAIEKNKDSLSQNLLFVMKTSENVVINHLFQSKLSQTGSLVSAYPSFKFRGHKSALLSKKMTASSIIGENKNYLELSKLLKKKGTSTFLQRLERGDPVTIASQLRKSLMDIIGKLQKCTPHFIHCIRPNNSKLPDTFDNFYVSAQLQYIGVLEMVKIFRYGYPVRLSFSDFLSRYKPLADTFLREKKEQSAAERCRLVLQQCKLQGWQMGVRKVFLKYWHADQLNDLCLQLQRKIITCQKVIRGFLARQHLLQRISIRQQEVTSINSFLQNTEDMGLKTYDALVIQNASDIARENDRLRSEMNAPYHKEKLEVRNMQEEGSKRTDDKSGPRHFHPSSMSVCAAVDGLGQCLVGPSIWSPSLHSVFSMDDSSSLPSPRKQPPPKPKRDPNTRLSASYEAVSACLSAAREAANEALARPRPHSDDYSTMKKIPPRKPKRSPNTKLSGSYEEISGSRPGDARPAGAPGAAARVLTPGTPQCALPPAAPPGDEDDSEPVYIEMLGHAARPDSPDPGESVYEEMKCCLPDDGGPGAGSFLLHGASPPLLHRAPEDEAAGPPGDACDIPPPFPNLLPHRPPLLVFPPTPVTCSPASDESPLTPLEVKKLPVLETNLKYPVQPEGSSPLSPQYSKSQKGDGDRPASPGLALFNGSGRASPPSTPPPPPPPPGPPPAPYRPCAHLAFPPEPAPVNAGKAGPSAEAPKVHPKPNSAPVAGPCSSFPKIPYSPVKATRADARKAGSSASPPAPYSPPSSRPLSSPLDELASLFNSGRSVLRKSAAGRKIREAEGFETNMNISSRDDPSTSEITSETQDRNANNHGIQLSNSLSSAITAENGNSISNGLPEEDGYSRLSISGTGTSTFQRHRDSHTTQVIHQLRLSENESVALQELLDWRRKLCEEGQDWQQILHHAEPRVPPPPPCKKPSLLKKPEGASCNRLPSELWDTTI

SEQ ID NO: 267 - protein, 2481 aa, Homo sapiens
MEQSPPPAPEPTQGPTPARSRRRREPESPPASAPIPLFGADTIGQRSPDGPVLSKAEFVEKVRQSNQACHDGDFHTAIVLYNEALAVDPQNCILYSNRSAAYMKIQQYDKALDDAIKARLLNPKWPKAYFRQGVALQYLGRHADALAAFASGLAQDPKSLQLLVGMVEAAMKSPMRDSLEPTYQQLQKMKLDKSPFVVVSVVGQELLTAGHHGASVVVLEAALKIGTCSLKLRGSVFSALSSAYWSLGNTEKSTGYMQQDLDVAKTLGDQTGECRAHGNLGSAFFSKGNYREALTNHRHQLVLAMKLKDREAASSALSSLGHVYTAIGDYPNALASHKQCVLLAKQSKDELSEARELGNMGAVYIAMGDFENAVQCHEQHLKIAKDLGNKREEARAYSNLGSAYHYRRNFDKAMSYHNYVLELAQELMEKAIEMRAYAGLGHAARCMQDLERAKQYHEQQLGIAEDLKDRAAEGRASSNLGIIHQMKGDYDTALKLHKTHLCIAQELSDYAAQGRAYGNMGNAYNALGMYDQAVKYHRQELQISMEVNDRASQASTHGNLAVAYQALGAHDRALQHYQNHLNIARELRDIQSEARALSNLGNFHCSRGEYVQAAPYYEQYLRLAPDLQDMEGEGKVCHNLGYAHYCLGNYQEAVKYYEQDLALAKDLHDKLSQAKAYCNLGLAFKALLNFSKAEECQKYLLSLAQSLNNSQAKFRALGNLGDIFICKKDINGAIKFYEQQLGLAHQVKDRRLEASAYAALGTAYRMIQKYDKALGYHTQELEVYQELSDLPGECRAHGHLAAVYMALGKYTMAFKCYEEQLDLGQKLKDPSLEAQVYGNMGITKMNMNVMEEAIGYFEQQLAMLQQLSGNESVLDRGRAYGNLGDCYEALGDYEEAIKYYEQYLSVAQSLNRMQDQAKAYRGLGNGHRAMGSLQQALVCFEKRLVVAHELGEAFNKAQAYGELGSLHSQLGNYEQAISCLERQLNIARDMKDRALESDAACGLGGVYQQMGEYDTALQYHQLDLQIAEETNNPTCQGRAYGNLGLTYESLGTFERAVVYQEQHLSIAAQMNDLAAKTVSYSSLGRTHHALQNYSQAVMYLQEGLRLAEQLGRREDEAKIRHGLGLSLWASGNLEEAQHQLYRASALFETIRHEAQLSTDYKLSLFDLQTSSYQALQRVLVSLGHHDEALAVAERGRTRAFADLLVERQTGQQDSDPYSPVTIDQILEMVNGQRGLVLYYSLAAGYLYSWLLAPGAGIVKFHEHYLGENTVENSSDFQASSSVTLPTATGSALEQHIASVREALGVESHYSRACASSETESEAGDIMDQQFEEMNNKLNSVTDPTGFLRMVRRNNLFNRSCQSMTSLFSNTVSPTQDGTSSLPRRQSSFAKPPLRALYDLLIAPMEGGLMHSSGPVGRHRQLILVLEGELYLIPFALLKGSSSNEYLYERFGLLAVPSIRSLSVQSKSHLRKNPPTYSSSTSMAAVIGNPKLPSAVMDRWLWGPMPSAEEEAYMVSELLGCQPLVGSVATKERVMSALTQAECVHFATHISWKLSALVLTPSMDGNPASSKSSFGHPYTIPESLRVQDDASDGESISDCPPLQELLLTAADVLDLQLPVKLVVLGSSQESNSKVTADGVIALTRAFLAAGAQCVLVSLWPVPVAASKMFIHAFYSSLLNGLKASAALGEAMKVVQSSKAFSHPSNWAGFMLIGSDVKLNSPSSLIGQALTEILQHPERARDALRVLLHLVEKSLQRIQNGQRNAMYTSQQSVENKVGGIPGWQALLTAVGFRLDPPTSGLPAAVFFPTSDPGDRLQQCSSTLQSLLGLPNPALQALCKLITASETGEQLISRAVKNMVGMLHQVLVQLQAGEKEQDLASAPIQVSISVQLWRLPGCHEFLAALGFDLCEVGQEEVILKTGKQANRRTVHFALQSLLSLFDSTELPKRLSLDSSSSLESLASAQSVSNALPLGYQQPPFSPTGADSIASDAISVYSLSSIASSMSFVSKPEGGSEGGGPGGRQDHDRSKNAYLQRSTLPRSQLPPQTRPAGNKDEEEYEGFSIISNEPLATYQENRNTCFSPDHKQPQPGTAGGMRVSVSSKGSISTPNSPVKMTLIPSPNSPFQKVGKLASSDTGESDQSSTETDSTVKSQEESNPKLDPQELAQKILEETQSHLIAVERLQRSGGQVSKSNNPEDGVQAPSSTAVFRASETSAFSRPVLSHQKSQPSPVTVKPKPPARSSSLPKVSSGYSSPTTSEMSIKDSPSQHSGRPSPGCDSQTSQLDQPLFKLKYPSSPYSAHISKSPRNMSPSSGHQSPAGSAPSPALSYSSAGSARSSPADAPDIDKLKMAAIDEKVQAVHNLKMFWQSTPQHSTGPMKIFRGAPGTMTSKRDVLSLLNLSPRHNKKEEGVDKLELKELSLQQHDGAPPKAPPNGHWRTETTSLGSLPLPAGPPATAPARPLRLPSGNGYKFLSPGRFFPSSKC

SEQ ID NO: 268 - protein, 2341 aa, Homo sapiens
MGSQTLQILRQGVWAALSGGWYYDPHQATFVNALHLYLWLFLLGLPFTLYMALPSTMIIVAVYCPVIAAVFIVLKMVNYRLHRALDAGEVVDRTANEFTDQRTKAEQGNCSTRRKDSNGPSDPGGGIEMSEFIREATPPVGCSSRNSYAGLDPSNQIGSGSSRLGTAATIKGDTDTAKTSDDISLSLGQSSSLCKEGSEEQDLAADRKLFRLVSNDSFISIQPSLSSCGQDLPRDFSDKVNLPSHNHHHHVDQSLSSACDTEVASLVPLHSHSYRKDHRPRGVPRTSSSAVAFPDTSLNDFPLYQQRRGLDPVSELESSKPLSGSKESLVENSGLSGEFQLAGDLKINTSQPPTKSGKSKPLKAEKSMDSLRSLSTRSSGSTESYCSGTDRDTNSTVSSYKSEQTSSTHIESILSEHEESPKAGTKSGRKKECCAGPEEKNSCASDKRTSSEKIAMEASTNSGVHEAKDPTPSDEMHNQRGLSTSASEEANKNPHANEFTSQGDRPPGNTAENKEEKSDKSAVSVDSKVRKDVGGKQKEGDVRPKSSSVIHRTASAHKSGRRRTGKKRASSFDSSRHRDYVCFRGVSGTKPHSAIFCHDEDSSDQSDLSRASSVQSAHQFSSDSSSSTTSHSCQSPEGRYSALKTKHTHKERGTDSEHTHKAHLVPEGTSKKRATRRTSSTNSAKTRARVLSLDSGTVACLNDSNRLMAPESIKPLTTSKSDLEAKEGEVLDELSLLGRASQLETVTRSRNSLPNQVAFPEGEEQDAVSGAAQASEEAVSFRRERSTFRRQAVRRRHNAGSNPTPPTLLIGSPLSLQDGQQGQQSTAQVKVQSRPPSQAAVLSASASLLVRNGSVHLEASHDNASAVGGSSLHDELGKFSSTLYETGGCDMSLVNFEPAARRASNICDTDSHVSSSTSVRFYPHDVLSLPQIRLNRLLTIDTDLLEQQDIDLSPDLAATYGPTEEAAQKVKHYYRFWILPQLWIGINFDRLTLLALFDRNREILENVLAVILAILVAFLGSILLIQGFFRDIWVFQFCLVIASCQYSLLKSVQPDSSSPRHGHNRIIAYSRPVYFCICCGLIWLLDYGSRNLTATKFKLYGITFTNPLVFISARDLVIVFTLCFPIVFFIGLLPQVNTFVMYLCEQLDIHIFGGNATTSLLAALYSFICSIVAVALLYGLCYGALKDSWDGQHIPVLFSIFCGLLVAVSYHLSRQSSDPSVLFSLVQSKIFPKTEEKNPEDPLSEVKDPLPEKLRNSVSERLQSDLVVCIVIGVLYFAIHVSTVFTVLQPALKYVLYTLVGFVGFVTHYVLPQVRKQLPWHCFSHPLLKTLEYNQYEVRNAATMMWFEKLHVWLLFVEKNIIYPLIVLNELSSSAETIASPKKLNTELGALMITVAGLKLLRSSFSSPTYQYVTVIFTVLFFKFDYEAFSETMLLDLFFMSILFNKLWELLYKLQFVYTYIAPWQITWGSAFHAFAQPFAVPHSAMLFIQAAVSAFFSTPLNPFLGSAIFITSYVRPVKFWERDYNTKRVDHSNTRLASQLDRNPGSDDNNLNSIFYEHLTRSLQHSLCGDLLLGRWGNYSTGDCFILASDYLNALVHLIEIGNGLVTFQLRGLEFRGTYCQQREVEAITEGVEEDEGFCCCEPGHIPHMLSFNAAFSQRWLAWEVIVTKYILEGYSITDNSAASMLQVFDLRKVLTTYYVKGIIYYVTTSSKLEEWLANETMQEGLRLCADRNYVDVDPTFNPNIDEDYDHRLAGISRESFCVIYLNWIEYCSSRRAKPVDVDKDSSLVTLCYGLCVLGRRALGTASHHMSSNLESFLYGLHALFKGDFRISSIRDEWIFADMELLRKVVVPGIRMSIKLHQDHFTSPDEYDDPTVLYEAIVSHEKNLVIAHEGDPAWRSAVLANSPSLLALRHVMDDGTNEYKIIMLNRRYLSFRVIKVNKECVRGLWAGQQQELVFLRNRNPERGSIQNAKQALRNMINSSCDQPIGYPIFVSPLTTSYSDSHEQLKDILGGPISLGNIRNFIVSTWHRLRKGCGAGCNSGGNIEDSDTGGGTSCTGNNATTANNPHSNVTQGSIGNPGQGSGTGLHPPVTSYPPTLGTSHSSHSVQSGLVRQSPARASVASQSSYCYSSRHSSLRMSTTGFVPCRRSSTSQISLRNLPSSIQSRLSMVNQMEPSGQSGLACVQHGLPSSSSSSQSIPACKHHTLVGFLATEGGQSSATDAQPGNTLSPANNSHSRKAEVIYRVQIVDPSQILEGINLSKRKELQWPDEGIRLKAGRNSWKDWSPQEGMEGHVIHRWVPCSRDPGTRSHIDKAVLLVQIDDKYVTVIETGVLELGAEV

SEQ ID NO: 269 - protein, 1960 aa, Homo sapiens
MAQQAADKYLYVDKNFINNPLAQADWAAKKLVWVPSDKSGFEPASLKEEVGEEAIVELVENGKKVKVNKDDIQKMNPPKFSKVEDMAELTCLNEASVLHNLKERYYSGLIYTYSGLFCVVINPYKNLPIYSEEIVEMYKGKKRHEMPPHIYAITDTAYRSMMQDREDQSILCTGESGAGKTENTKKVIQYLAYVASSHKSKKDQGELERQLLQANPILEAFGNAKTVKNDNSSRFGKFIRINFDVNGYIVGANIETYLLEKSRAIRQAKEERTFHIFYYLLSGAGEHLKTDLLLEPYNKYRFLSNGHVTIPGQQDKDMFQETMEAMRIMGIPEEEQMGLLRVISGVLQLGNIVFKKERNTDQASMPDNTAAQKVSHLLGINVTDFTRGILTPRIKVGRDYVQKAQTKEQADFAIEALAKATYERMFRWLVLRINKALDKTKRQGASFIGILDIAGFEIFDLNSFEQLCINYTNEKLQQLFNHTMFILEQEEYQREGIEWNFIDFGLDLQPCIDLIEKPAGPPGILALLDEECWFPKATDKSFVEKVMQEQGTHPKFQKPKQLKDKADFCIIHYAGKVDYKADEWLMKNMDPLNDNIATLLHQSSDKFVSELWKDVDRIIGLDQVAGMSETALPGAFKTRKGMFRTVGQLYKEQLAKLMATLRNTNPNFVRCIIPNHEKKAGKLDPHLVLDQLRCNGVLEGIRICRQGFPNRVVFQEFRQRYEILTPNSIPKGFMDGKQACVLMIKALELDSNLYRIGQSKVFFRAGVLAHLEEERDLKITDVIIGFQACCRGYLARKAFAKRQQQLTAMKVLQRNCAAYLKLRNWQWWRLFTKVKPLLQVSRQEEEMMAKEEELVKVREKQLAAENRLTEMETLQSQLMAEKLQLQEQLQAETELCAEAEELRARLTAKKQELEEICHDLEARVEEEEERCQHLQAEKKKMQQNIQELEEQLEEEESARQKLQLEKVTTEAKLKKLEEEQIILEDQNCKLAKEKKLLEDRIAEFTTNLTEEEEKSKSLAKLKNKHEAMITDLEERLRREEKQRQELEKTRRKLEGDSTDLSDQIAELQAQIAELKMQLAKKEEELQAALARVEEEAAQKNMALKKIRELESQISELQEDLESERASRNKAEKQKRDLGEELEALKTELEDTLDSTAAQQELRSKREQEVNILKKTLEEEAKTHEAQIQEMRQKHSQAVEELAEQLEQTKRVKANLEKAKQTLENERGELANEVKVLLQGKGDSEHKRKKVEAQLQELQVKFNEGERVRTELADKVTKLQVELDNVTGLLSQSDSKSSKLTKDFSALESQLQDTQELLQEENRQKLSLSTKLKQVEDEKNSFREQLEEEEEAKHNLEKQIATLHAQVADMKKKMEDSVGCLETAEEVKRKLQKDLEGLSQRHEEKVAAYDKLEKTKTRLQQELDDLLVDLDHQRQSACNLEKKQKKFDQLLAEEKTISAKYAEERDRAEAEAREKETKALSLARALEEAMEQKAELERLNKQFRTEMEDLMSSKDDVGKSVHELEKSKRALEQQVEEMKTQLEELEDELQATEDAKLRLEVNLQAMKAQFERDLQGRDEQSEEKKKQLVRQVREMEAELEDERKQRSMAVAARKKLEMDLKDLEAHIDSANKNRDEAIKQLRKLQAQMKDCMRELDDTRASREEILAQAKENEKKLKSMEAEMIQLQEELAAAERAKRQAQQERDELADEIANSSGKGALALEEKRRLEARIAQLEEELEEEQGNTELINDRLKKANLQIDQINTDLNLERSHAQKNENARQQLERQNKELKVKLQEMEGTVKSKYKASITALEAKIAQLEEQLDNETKERQAACKQVRRTEKKLKDVLLQVDDERRNAEQYKDQADKASTRLKQLKRQLEEAEEEAQRANASRRKLQRELEDATETADAMNREVSSLKNKLRRGDLPFVVPRRMARKGAGDGSDEEVDGKADGAEAKPAE

SEQ ID NO: 270 - protein, 4391 aa, Homo sapiens
MGWRAAGALLLALLLHGRLLAVTHGLRAYDGLSLPEDIETVTASQMRWTHSYLSDDEDMLADSISGDDLGSGDLGSGDFQMVYFRALVNFTRSIEYSPQLEDAGSREFREVSEAVVDTLESEYLKIPGDQVVSVVFIKELDGWVFVELDVGSEGNADGAQIQEMLLRVISSGSVASYVTSPQGFQFRRLGTVPQFPRACTEAEFACHSYNECVALEYRCDRRPDCRDMSDELNCEEPVLGISPTFSLLVETTSLPPRPETTIMRQPPVTHAPQPLLPGSVRPLPCGPQEAACRNGHCIPRDYLCDGQEDCEDGSDELDCGPPPPCEPNEFPCGNGHCALKLWRCDGDFDCEDRTDEANCPTKRPEEVCGPTQFRCVSTNMCIPASFHCDEESDCPDRSDEFGCMPPQVVTPPRESIQASRGQTVTFTCVAIGVPTPIINWRLNWGHIPSHPRVTVTSEGGRGTLIIRDVKESDQGAYTCEAMNARGMVFGIPDGVLELVPQRGPCPDGHFYLEHSAACLPCFCFGITSVCQSTRRFRDQIRLRFDQPDDFKGVNVTMPAQPGTPPLSSTQLQIDPSLHEFQLVDLSRRFLVHDSFWALPEQFLGNKVDSYGGSLRYNVRYELARGMLEPVQRPDVVLMGAGYRLLSRGHTPTQPGALNQRQVQFSEEHWVHESGRPVQRAELLQVLQSLEAVLIQTVYNTKMASVGLSDIAMDTTVTHATSHGRAHSVEECRCPIGYSGLSCESCDAHFTRVPGGPYLGTCSGCNCNGHASSCDPVYGHCLNCQHNTEGPQCNKCKAGFFGDAMKATATSCRPCPCPYIDASRRFSDTCFLDTDGQATCDACAPGYTGRRCESCAPGYEGNPIQPGGKCRPVNQEIVRCDERGSMGTSGEACRCKNNVVGRLCNECADGSFHLSTRNPDGCLKCFCMGVSRHCTSSSWSRAQLHGASEEPGHFSLTNAASTHTTNEGIFSPTPGELGFSSFHRLLSGPYFWSLPSRFLGDKVTSYGGELRFTVTQRSQPGSTPLHGQPLVVLQGNNIILEHHVAQEPSPGQPSTFIVPFREQAWQRPDGQPATREHLLMALAGIDTLLIRASYAQQPAESRVSGISMDVAVPEETGQDPALEVEQCSCPPGYRGPSCQDCDTGYTRTPSGLYLGTCERCSCHGHSEACEPETGACQGCQHHTEGPRCEQCQPGYYGDAQRGTPQDCQLCPCYGDPAAGQAAHTCFLDTDGHPTCDACSPGHSGRHCERCAPGYYGNPSQGQPCQRDSQVPGPIGCNCDPQGSVSSQCDAAGQCQCKAQVEGLTCSHCRPHHFHLSASNPDGCLPCFCMGITQQCASSAYTRHLISTHFAPGDFQGFALVNPQRNSRLTGEFTVEPVPEGAQLSFGNFAQLGHESFYWQLPETYQGDKVAAYGGKLRYTLSYTAGPQGSPLSDPDVQITGNNIMLVASQPALQGPERRSYEIMFREEFWRRPDGQPATREHLLMALADLDELLIRATFSSVPLAASISAVSLEVAQPGPSNRPRALEVEECRCPPGYIGLSCQDCAPGYTRTGSGLYLGHCELCECNGHSDLCHPETGACSQCQHNAAGEFCELCAPGYYGDATAGTPEDCQPCACPLTNPENMFSRTCESLGAGGYRCTACEPGYTGQYCEQCGPGYVGNPSVQGGQCLPETNQAPLVVEVHPARSIVPQGGSHSLRCQVSGSPPHYFYWSREDGRPVPSGTQQRHQGSELHFPSVQPSDAGVYICTCRNLHQSNTSRAELLVTEAPSKPITVTVEEQRSQSVRPGADVTFICTAKSKSPAYTLVWTRLHNGKLPTRAMDFNGILTIRNVQLSDAGTYVCTGSNMFAMDQGTATLHVQASGTLSAPVVSIHPPQLTVQPGQLAEFRCSATGSPTPTLEWTGGPGGQLPAKAQIHGGILRLPAVEPTDQAQYLCRAHSSAGQQVARAVLHVHGGGGPRVQVSPERTQVHAGRTVRLYCRAAGVPSATITWRKEGGSLPPQARSERTDIATLLIPAITTADAGFYLCVATSPAGTAQARIQVVVLSASDASPPPVKIESSSPSVTEGQTLDLNCVVAGSAHAQVTWYRRGGSLPPHTQVHGSRLRLPQVSPADSGEYVCRVENGSGPKEASITVSVLHGTHSGPSYTPVPGSTRPIRIEPSSSHVAEGQTLDLNCVVPGQAHAQVTWHKRGGSLPARHQTHGSLLRLHQVTPADSGEYVCHVVGTSGPLEASVLVTIEASVIPGPIPPVRIESSSSTVAEGQTLDLSCVVAGQAHAQVTWYKRGGSLPARHQVRGSRLYIFQASPADAGQYVCRASNGMEASITVTVTGTQGANLAYPAGSTQPIRIEPSSSQVAEGQTLDLNCVVPGQSHAQVTWHKRGGSLPVRHQTHGSLLRLYQASPADSGEYVCRVLGSSVPLEASVLVTIEPAGSVPALGVTPTVRIESSSSQVAEGQTLDLNCLVAGQAHAQVTWHKRGGSLPARHQVHGSRLRLLQVTPADSGEYVCRVVGSSGTQEASVLVTIQQRLSGSHSQGVAYPVRIESSSASLANGHTLDLNCLVASQAPHTITWYKRGGSLPSRHQIVGSRLRIPQVTPADSGEYVCHVSNGAGSRETSLIVTIQGSGSSHVPSVSPPIRIESSSPTVVEGQTLDLNCVVARQPQAIITWYKRGGSLPSRHQTHGSHLRLHQMSVADSGEYVCRANNNIDALEASIVISVSPSAGSPSAPGSSMPIRIESSSSHVAEGETLDLNCVVPGQAHAQVTWHKRGGSLPSHHQTRGSRLRLHHVSPADSGEYVCRVMGSSGPLEASVLVTIEASGSSAVHVPAPGGAPPIRIEPSSSRVAEGQTLDLKCVVPGQAHAQVTWHKRGGNLPARHQVHGPLLRLNQVSPADSGEYSCQVTGSSGTLEASVLVTIEPSSPGPIPAPGLAQPIYIEASSSHVTEGQTLDLNCVVPGQAHAQVTWYKRGGSLPARHQTHGSQLRLHLVSPADSGEYVCRAASGPGPEQEASFTVTVPPSEGSSYRLRSPVISIDPPSSTVQQGQDASFKCLIHDGAAPISLEWKTRNQELEDNVHISPNGSIITIVGTRPSNHGTYRCVASNAYGVAQSVVNLSVHGPPTVSVLPEGPVWVKVGKAVTLECVSAGEPRSSARWTRISSTPAKLEQRTYGLMDSHAVLQISSAKPSDAGTYVCLAQNALGTAQKQVEVIVDTGAMAPGAPQVQAEEAELTVEAGHTATLRCSATGSPAPTIHWSKLRSPLPWQHRLEGDTLIIPRVAQQDSGQYICNATSPAGHAEATIILHVESPPYATTVPEHASVQAGETVQLQCLAHGTPPLTFQWSRVGSSLPGRATARNELLHFERAAPEDSGRYRCRVTNKVGSAEAFAQLLVQGPPGSLPATSIPAGSTPTVQVTPQLETKSIGASVEFHCAVPSDRGTQLRWFKEGGQLPPGHSVQDGVLRIQNLDQSCQGTYICQAHGPWGKAQASAQLVIQALPSVLINIRTSVQTVVVGHAVEFECLALGDPKPQVTWSKVGGHLRPGIVQSGGVVRIAHVELADAGQYRCTATNAAGTTQSHVLLLVQALPQISMPQEVRVPAGSAAVFPCIASGYPTPDISWSKLDGSLPPDSRLENNMLMLPSVRPQDAGTYVCTATNRQGKVKAFAHLQVPERVVPYFTQTPYSFLPLPTIKDAYRKFEIKITFRPDSADGMLLYNGQKRVPGSPTNLANRQPDFISFGLVGGRPEFRFDAGSGMATIRHPTPLALGHFHTVTLLRSLTQGSLIVGDLAPVNGTSQGKFQGLDLNEELYLGGYPDYGAIPKAGLSSGFIGCVRELRIQGEEIVFHDLNLTAHGISHCPTCRDRPCQNGGQCHDSESSSYVCVCPAGFTGSRCEHSQALHCHPEACGPDATCVNRPDGRGYTCRCHLGRSGLRCEEGVTVTTPSLSGAGSYLALPALTNTHHELRLDVEFKPLAPDGVLLFSGGKSGPVEDFVSLAMVGGHLEFRYELGSGLAVLRSAEPLALGRWHRVSAERLNKDGSLRVNGGRPVLRSSPGKSQGLNLHTLLYLGGVEPSVPLSPATNMSAHFRGCVGEVSVNGKRLDLTYSFLGSQGIGQCYDSSPCERQPCQHGATCMPAGEYEFQCLCRDGFKGDLCEHEENPCQLREPCLHGGTCQGTRCLCLPGFSGPRCQQGSGHGIAESDWHLEGSGGNDAPGQYGAYFHDDGFLAFPGHVFSRSLPEVPETIELEVRTSTASGLLLWQGVEVGEAGQGKDFISLGLQDGHLVFRYQLGSGEARLVSEDPINDGEWHRVTALREGRRGSIQVDGEELVSGRSPGPNVAVNAKGSVYIGGAPDVATLTGGRFSSGITGCVKNLVLHSARPGAPPPQPLDLQHRAQAGANTRPCPS

SEQ ID NO: 271 - protein, 2303 aa, Homo sapiens
MASSVAPYEQLVRQVEALKAENSHLRQELRDNSSHLSKLETETSGMKEVLKHLQGKLEQEARVLVSSGQTEVLEQLKALQMDITSLYNLKFQPPTLGPEPAARTPEGSPVHGSGPSKDSFGELSRATIRLLEELDRERCFLLNEIEKEEKEKLWYYSQLQGLSKRLDELPHVETQFSMQMDLIRQQLEFEAQHIRSLMEERFGTSDEMVQRAQIRASRLEQIDKELLEAQDRVQQTEPQALLAVKSVPVDEDPETEVPTHPEDGTPQPGNSKVEVVFWLLSMLATRDQEDTARTLLAMSSSPESCVAMRRSGCLPLLLQILHGTEAAAGGRAGAPGAPGAKDARMRANAALHNIVFSQPDQGLARKEMRVLHVLEQIRAYCETCWDWLQARDGGPEGGGAGSAPIPIEPQICQATCAVMKLSFDEEYRRAMNELGGLQAVAELLQVDYEMHKMTRDPLNLALRRYAGMTLTNLTFGDVANKATLCARRGCMEAIVAQLASDSEELHQVVSSILRNLSWRADINSKKVLREAGSVTALVQCVLRATKESTLKSVLSALWNLSAHSTENKAAICQVDGALGFLVSTLTYKCQSNSLAIIESGGGILRNVSSLVATREDYRQVLRDHNCLQTLLQHLTSHSLTIVSNACGTLWNLSARSARDQELLWDLGAVGMLRNLVHSKHKMIAMGSAAALRNLLAHRPAKHQAAATAVSPGSCVPSLYVRKQRALEAELDARHLAQALEHLEKQGPPAAEAATKKPLPPLRHLDGLAQDYASDSGCFDDDDAPSSLAAAAATGEPASPAALSLFLGSPFLQGQALARTPPTRRGGKEAEKDTSGEAAVAAKAKAKLALAVARIDQLVEDISALHTSSDDSFSLSSGDPGQEAPREGRAQSCSPCRGPEGGRREAGSRAHPLLRLKAAHASLSNDSLNSGSASDGYCPREHMLPCPLAALASRREDPRCGQPRPSRLDLDLPGCQAEPPAREATSADARVRTIKLSPTYQHVPLLEGASRAGAEPLAGPGISPGARKQAWLPADHLSKVPEKLAAAPLSVASKALQKLAAQEGPLSLSRCSSLSSLSSAGRPGPSEGGDLDDSDSSLEGLEEAGPSEAELDSTWRAPGATSLPVAIPAPRRNRGRGLGVEDATPSSSSENYVQETPLVLSRCSSVSSLGSFESPSIASSIPSEPCSGQGSGTISPSELPDSPGQTMPPSRSKTPPLAPAPQGPPEATQFSLQWESYVKRFLDIADCRERCRLPSELDAGSVRFTVEKPDENFSCASSLSALALHEHYVQQDVELRLLPSACPERGGGAGGAGLHFAGHRRREEGPAPTGSRPRGAADQELELLRECLGAAVPARLRKVASALVPGRRALPVPVYMLVPAPAPAQEDDSCTDSAEGTPVNFSSAASLSDETLQGPPRDQPGGPAGRQRPTGRPTSARQAMGHRHKAGGAGRSAEQSRGAGKNRAGLELPLGRPPSAPADKDGSKPGRTRGDGALQSLCLTTPTEEAVYCFYGNDSDEEPPAAAPTPTHRRTSAIPRAFTRERPQGRKEAPAPSKAAPAAPPPARTQPSLIADETPPCYSLSSSASSLSEPEPSEPPAVHPRGREPAVTKDPGPGGGRDSSPSPRAAEELLQRCISSALPRRRPPVSGLRRRKPRATRLDERPAEGSRERGEEAAGSDRASDLDSVEWRAIQEGANSIVTWLHQAAAATREASSESDSILSFVSGLSVGSTLQPPKHRKGRQAEGEMGSARRPEKRGAASVKTSGSPRSPAGPEKPRGTQKTTPGVPAVLRGRTVIYVPSPAPRAQPKGTPGPRATPRKVAPPCLAQPAAPAKVPSPGQQRSRSLHRPAKTSELATLSQPPRSATPPARLAKTPSSSSSQTSPASQPLPRKRPPVTQAAGALPGPGASPVPKTPARTLLAKQHKTQRSPVRIPFMQRPARRGPPPLARAVPEPGPRGRAGTEAGPGARGGRLGLVRVASALSSGSESSDRSGFRRQLTFIKESPGLRRRRSELSSAESAASAPQGASPRRGRPALPAVFLCSSRCEELRAAPRQGPAPARQRPPAARPSPGERPARRTTSESPSRLPVRAPAARPETVKRYASLPHISVARRPDGAVPAAPASADAARRSSDGEPRPLPRVAAPGTTWRRIRDEDVPHILRSTLPATALPLRGSTPEDAPAGPPPRKTSDAVVQTEEVAAPKTNSSTSPSLETREPPGAPAGGQLSLLGSDVDGPSLAKAPISAPFVHEGLGVAVGGFPASRHGSPSRSARVPPFNYVPSPMVVAATTDSAAEKAPATASATLLE

SEQ ID NO: 272 - protein, 1966 aa, Homo sapiens
MWIPTEHEKYGVVIASFRGTVPYGLSLEIGDTVQILEKCDGWYRGFALKNPNIKGIFPSSYVHLKNACVKNKGQFEMVIPTEDSVITEMTSTLRDWGTMWKQLYVRNEGDLFHRLWHIMNEILDLRRQVLVGHLTHDRMKDVKRHITARLDWGNEQLGLDLVPRKEYAMVDPEDISITELYRLMEHRHRKKDTPVQASSHHLFVQMKSLMCSNLGEELEVIFSLFDSKENRPISERFFLRLNRNGLPKAPDKPERHCSLFVDLGSSELRKDIYITVHIIRIGRMGAGEKKNACSVQYRRPFGCAVLSIADLLTGETKDDLILKVYMCNTESEWYQIHENIIKKLNARYNLTGSNAGLAVSLQLLHGDIEQIRREYSSVFSHGVSITRKLGFSNIIMPGEMRNDLYITIERGEFEKGGKSVARNVEVTMFIVDSSGQTLKDFISFGSGEPPASEYHSFVLYHNNSPRWSELLKLPIPVDKFRGAHIRFEFRHCSTKEKGEKKLFGFSFVPLMQEDGRTLPDGTHELIVHKCEENTNLQDTTRYLKLPFSKGIFLGNNNQAMKATKESFCITSFLCSTKLTQNGDMLDLLKWRTHPDKITGCLSKLKEIDGSEIVKFLQDTLDTLFGILDENSQKYGSKVFDSLVHIINLLQDSKFHHFKPVMDTYIESHFAGALAYRDLIKVLKWYVDRITEAERQEHIQEVLKAQEYIFKYIVQSRRLFSLATGGQNEEEFRCCIQELLMSVRFFLSQESKGSGALSQSQAVFLSSFPAVYSELLKLFDVREVANLVQDTLGSLPTILHVDDSLQAIKLQCIGKTVESQLYTNPDSRYILLPVVLHHLHIHLQEQKDLIMCARILSNVFCLIKKNSSEKSVLEEIDVIVASLLDILLRTILEITSRPQPSSSAMRFQFQDVTGEFVACLLSLLRQMTDRHYQQLLDSFNTKEELRDFLLQIFTVFRILIRPEMFPKDWTVMRLVANNVIITTVLYLSDALRKNFLNENFDYKIWDSYFYLAVIFINQLCLQLEMFTPSKKKKVLEKYGDMRVTMGCEIFSMWQNLGEHKLHFIPALIGPFLEVTLIPQPDLRNVMIPIFHDMMDWEQRRSGNFKQVEAKLIDKLDSLMSEGKGDETYRELFNSILLKKIERETWRESGVSLIATVTRLMERLLDYRDCMKMGEVDGKKIGCTVSLLNFYKTELNKEEMYIRYIHKLYDLHLKAQNFTEAAYTLLLYDELLEWSDRPLREFLTYPMQTEWQRKEHLHLTIIQNFDRGKCWENGIILCRKIAEQYESYYDYRNLSKMRMMEASLYDKIMDQQRLEPEFFRVGFYGKKFPFFLRNKEFVCRGHDYERLEAFQQRMLNEFPHAIAMQHANQPDETIFQAEAQYLQIYAVTPIPESQEVLQREGVPDNIKSFYKVNHIWKFRYDRPFHKGTKDKENEFKSLWVERTSLYLVQSLPGISRWFEVEKREVVEMSPLENAIEVLENKNQQLKTLISQCQTRQMQNINPLTMCLNGVIDAAVNGGVSRYQEAFFVKEYILSHPEDGEKIARLRELMLEQAQILEFGLAVHEKFVPQDMRPLHKKLVDQFFVMKSSLGIQEFSACMQASPVHFPNGSPRVCRNSAPASVSPDGTRVIPRRSPLSYPAVNRYSSSSLSSQASAEVSNITGQSESSDEVFNMQPSPSTSSLSSTHSASPNVTSSAPSSARASPLLSDKHKHSRENSCLSPRERPCSAIYPTPVEPSQRMLFNHIGDGALPRSDPNLSAPEKAVNPTPSSWSLDSGKEAKNMSDSGKLISPPVPPRPTQTASPARHTTSVSPSPAGRSPLKGSVQSFTPSPVEYHSPGLISNSPVLSGSYSSGISSLSRCSTSETSGFENQVNEQSAPLPVPVPVPVPSYGGEEPVRKESKTPPPYSVYERTLRRPVPLPHSLSIPVTSEPPALPPKPLAARSSHLENGARRTDPGPRPRPLPRKVSQL

SEQ ID NO: 273 - protein, 1992 aa, Homo sapiens
MSNRPNNNPGGSLRRSQRNTAGAQPQDDSIGGRSCSSSSAVIVPQPEDPDRANTSERQKTGQVPKKDNSRGVKRSASPDYNRTNSPSSAKKPKALQHTESPSETNKPHSKSKKRHLDQEQQLKSAQSPSTSKAHTRKSGATGGSRSQKRKRTESSCVKSGSGSESTGAEERSAKPTKLASKSATSAKAGCSTITDSSSAASTSSSSSAVASASSTVPPGARVKQGKDQNKARRSRSASSPSPRRSSREKEQSKTGGSSKFDWAARFSPKVSLPKTKLSLPGSSKSETSKPGPSGLQAKLASLRKSTKKRSESPPAELPSLRRSTRQKTTGSCASTSRRGSGLGKRGAAEARRQEKMADPESNQEAVNSSAARTDEAPQGAAGAVGMTTSGESESDDSEMGRLQALLEARGLPPHLFGPLGPRMSQLFHRTIGSGASSKAQQLLQGLQASDESQQLQAVIEMCQLLVMGNEETLGGFPVKSVVPALITLLQMEHNFDIMNHACRALTYMMEALPRSSAVVVDAIPVFLEKLQVIQCIDVAEQALTALEMLSRRHSKAILQAGGLADCLLYLEFFSINAQRNALAIAANCCQSITPDEFHFVADSLPLLTQRLTHQDKKSVESTCLCFARLVDNFQHEENLLQQVASKDLLTNVQQLLVVTPPILSSGMFIMVVRMFSLMCSNCPTLAVQLMKQNIAETLHFLLCGASNGSCQEQIDLVPRSPQELYELTSLICELMPCLPKEGIFAVDTMLKKGNAQNTDGAIWQWRDDRGLWHPYNRIDSRIIEQINEDTGTARAIQRKPNPLANSNTSGYSESKKDDARAQLMKEDPELAKSFIKTLFGVLYEVYSSSAGPAVRHKCLRAILRIIYFADAELLKDVLKNHAVSSHIASMLSSQDLKIVVGALQMAEILMQKLPDIFSVYFRREGVMHQVKHLAESESLLTSPPKACTNGSGSMGSTTSVSSGTATAATHAAADLGSPSLQHSRDDSLDLSPQGRLSDVLKRKRLPKRGPRRPKYSPPRDDDKVDNQAKSPTTTQSPKSSFLASLNPKTWGRLSTQSNSNNIEPARTAGGSGLARAASKDTISNNREKIKGWIKEQAHKFVERYFSSENMDGSNPALNVLQRLCAATEQLNLQVDGGAECLVEIRSIVSESDVSSFEIQHSGFVKQLLLYLTSKSEKDAVSREIRLKRFLHVFFSSPLPGEEPIGRVEPVGNAPLLALVHKMNNCLSQMEQFPVKVHDFPSGNGTGGSFSLNRGSQALKFFNTHQLKCQLQRHPDCANVKQWKGGPVKIDPLALVQAIERYLVVRGYGRVREDDEDSDDDGSDEEIDESLAAQFLNSGNVRHRLQFYIGEHLLPYNMTVYQAVRQFSIQAEDERESTDDESNPLGRAGIWTKTHTIWYKPVREDEESNKDCVGGKRGRAQTAPTKTSPRNAKKHDELWHDGVCPSVSNPLEVYLIPTPPENITFEDPSLDVILLLRVLHAISRYWYYLYDNAMCKEIIPTSEFINSKLTAKANRQLQDPLVIMTGNIPTWLTELGKTCPFFFPFDTRQMLFYVTAFDRDRAMQRLLDTNPEINQSDSQDSRVAPRLDRKKRTVNREELLKQAESVMQDLGSSRAMLEIQYENEVGTGLGPTLEFYALVSQELQRADLGLWRGEEVTLSNPKGSQEGTKYIQNLQGLFALPFGRTAKPAHIAKVKMKFRFLGKLMAKAIMDFRLVDLPLGLPFYKWMLRQETSLTSHDLFDIDPVVARSVYHLEDIVRQKKRLEQDKSQTKESLQYALETLTMNGCSVEDLGLDFTLPGFPNIELKKGGKDIPVTIHNLEEYLRLVIFWALNEGVSRQFDSFRDGFESVFPLSHLQYFYPEELDQLLCGSKADTWDAKTLMECCRPDHGYTHDSRAVKFLFEILSSFDNEQQRLFLQFVTGSPRLPVGGFRSLNPPLTIVRKTFESTENPDDFLPSVMTCVNYLKLPDYSSIEIMREKLLIAAREGQQSFHLS

SEQ ID NO: 274 - protein, 3144 aa, Homo sapiens
MATLEKLMKAFESLKSFQQQQQQQQQQQQQQQQQQQQQQQPPPPPPPPPPPQLPQPPPQAQPLLPQPQPPPPPPPPPPGPAVAEEPLHRPKKELSATKKDRVNHCLTICENIVAQSVRNSPEFQKLLGIAMELFLLCSDDAESDVRMVADECLNKVIKALMDSNLPRLQLELYKEIKKNGAPRSLRAALWRFAELAHLVRPQKCRPYLVNLLPCLTRTSKRPEESVQETLAAAVPKIMASFGNFANDNEIKVLLKAFIANLKSSSPTIRRTAAGSAVSICQHSRRTQYFYSWLLNVLLGLLVPVEDEHSTLLILGVLLTLRYLVPLLQQQVKDTSLKGSFGVTRKEMEVSPSAEQLVQVYELTLHHTQHQDHNVVTGALELLQQLFRTPPPELLQTLTAVGGIGQLTAAKEESGGRSRSGSIVELIAGGGSSCSPVLSRKQKGKVLLGEEEALEDDSESRSDVSSSALTASVKDEISGELAASSGVSTPGSAGHDIITEQPRSQHTLQADSVDLASCDLTSSATDGDEEDILSHSSSQVSAVPSDPAMDLNDGTQASSPISDSSQTTTEGPDSAVTPSDSSEIVLDGTDNQYLGLQIGQPQDEDEEATGILPDEASEAFRNSSMALQQAHLLKNMSHCRQPSDSSVDKFVLRDEATEPGDQENKPCRIKGDIGQSTDDDSAPLVHCVRLLSASFLLTGGKNVLVPDRDVRVSVKALALSCVGAAVALHPESFFSKLYKVPLDTTEYPEEQYVSDILNYIDHGDPQVRGATAILCGTLICSILSRSRFHVGDWMGTIRTLTGNTFSLADCIPLLRKTLKDESSVTCKLACTAVRNCVMSLCSSSYSELGLQLIIDVLTLRNSSYWLVRTELLETLAEIDFRLVSFLEAKAENLHRGAHHYTGLLKLQERVLNNVVIHLLGDEDPRVRHVAAASLIRLVPKLFYKCDQGQADPVVAVARDQSSVYLKLLMHETQPPSHFSVSTITRIYRGYNLLPSITDVTMENNLSRVIAAVSHELITSTTRALTFGCCEALCLLSTAFPVCIWSLGWHCGVPPLSASDESRKSCTVGMATMILTLLSSAWFPLDLSAHQDALILAGNLLAASAPKSLRSSWASEEEANPAATKQEEVWPALGDRALVPMVEQLFSHLLKVINICAHVLDDVAPGPAIKAALPSLTNPPSLSPIRRKGKEKEPGEQASVPLSPKKGSEASAASRQSDTSGPVTTSKSSSLGSFYHLPSYLKLHDVLKATHANYKVTLDLQNSTEKFGGFLRSALDVLSQILELATLQDIGKCVEEILGYLKSCFSREPMMATVCVQQLLKTLFGTNLASQFDGLSSNPSKSQGRAQRLGSSSVRPGLYHYCFMAPYTHFTQALADASLRNMVQAEQENDTSGWFDVLQKVSTQLKTNLTSVTKNRADKNAIHNHIRLFEPLVIKALKQYTTTTCVQLQKQVLDLLAQLVQLRVNYCLLDSDQVFIGFVLKQFEYIEVGQFRESEAIIPNIFFFLVLLSYERYHSKQIIGIPKIIQLCDGIMASGRKAVTHAIPALQPIVHDLFVLRGTNKADAGKELETQKEVVVSMLLRLIQYHQVLEMFILVLQQCHKENEDKWKRLSRQIADIILPMLAKQQMHIDSHEALGVLNTLFEILAPSSLRPVDMLLRSMFVTPNTMASVSTVQLWISGILAILRVLISQSTEDIVLSRIQELSFSPYLISCTVINRLRDGDSTSTLEEHSEGKQIKNLPEETFSRFLLQLVGILLEDIVTKQLKVEMSEQQHTFYCQELGTLLMCLIHIFKSGMFRRITAAATRLFRSDGCGGSFYTLDSLNLRARSMITTHPALVLLWCQILLLVNHTDYRWWAEVQQTPKRHSLSSTKLLSPQMSGEEEDSDLAAKLGMCNREIVRRGALILFCDYVCQNLHDSEHLTWLIVNHIQDLISLSHEPPVQDFISAVHRNSAASGLFIQAIQSRCENLSTPTMLKKTLQCLEGIHLSQSGAVLTLYVDRLLCTPFRVLARMVDILACRRVEMLLAANLQSSMAQLPMEELNRIQEYLQSSGLAQRHQRLYSLLDRFRLSTMQDSLSPSPPVSSHPLDGDGHVSLETVSPDKDWYVHLVKSQCWTRSDSALLEGAELVNRIPAEDMNAFMMNSEFNLSLLAPCLSLGMSEISGGQKSALFEAAREVTLARVSGTVQQLPAVHHVFQPELPAEPAAYWSKLNDLFGDAALYQSLPTLARALAQYLVVVSKLPSHLHLPPEKEKDIVKFVVATLEALSWHLIHEQIPLSLDLQAGLDCCCLALQLPGLWSVVSSTEFVTHACSLIYCVHFILEAVAVQPGEQLLSPERRTNTPKAISEEEEEVDPNTQNPKYITAACEMVAEMVESLQSVLALGHKRNSGVPAFLTPLLRNIIISLARLPLVNSYTRVPPLVWKLGWSPKPGGDFGTAFPEIPVEFLQEKEVFKEFIYRINTLGWTSRTQFEETWATLLGVLVTQPLVMEQEESPPEEDTERTQINVLAVQAITSLVLSAMTVPVAGNPAVSCLEQQPRNKPLKALDTRFGRKLSIIRGIVEQEIQAMVSKRENIATHHLYQAWDPVPSLSPATTGALISHEKLLLQINPERELGSMSYKLGQVSIHSVWLGNSITPLREEEWDEEEEEEADAPAPSSPPTSPVNSRKHRAGVDIHSCSQFLLELYSRWILPSSSARRTPAILISEVVRSLLVVSDLFTERNQFELMYVTLTELRRVHPSEDEILAQYLVPATCKAAAVLGMDKAVAEPVSRLLESTLRSSHLPSRVGALHGVLYVLECDLLDDTAKQLIPVISDYLLSNLKGIAHCVNIHSQQHVLVMCATAFYLIENYPLDVGPEFSASIIQMCGVMLSGSEESTPSIIYHCALRGLERLLLSEQLSRLDAESLVKLSVDRVNVHSPHRAMAALGLMLTCMYTGKEKVSPGRTSDPNPAAPDSESVIVAMERVSVLFDRIRKGFPCEARVVARILPQFLDDFFPPQDIMNKVIGEFLSNQQPYPQFMATVVYKVFQTLHSTGQSSMVRDWVMLSLSNFTQRAPVAMATWSLSCFFVSASTSPWVAAILPHVISRMGKLEQVDVNLFCLVATDFYRHQIEEELDRRAFQSVLEVVAAPGSPYHRLLTCLRNVHKVTTC

SEQ ID NO: 275 - protein, 2033 aa, Homo sapiens
MFKGLSKGSQGKGSPKGSPAKGSPKGSPSRHSRAATQELALLISRMQANADQVERDILETQKRLQQDRLNSEQSQALQHQQETGRSLKEAEVLLKDLFLDVDKARRLKHPQAEEIEKDIKQLHERVTQECAEYRALYEKMVLPPDVGPRVDWARVLEQKQKQVCAGQYGPGMAELEQQIAEHNILQKEIDAYGQQLRSLVGPDAATIRSQYRDLLKAASWRGQSLGSLYTHLQGCTRQLSALAEQQRRILQQDWSDLMADPAGVRREYEHFKQHELLSQEQSVNQLEDDGERMVELRHPAVGPIQAHQEALKMEWQNFLNLCICQETQLQHVEDYRRFQEEADSVSQTLAKLNSNLDAKYSPAPGGPPGAPTELLQQLEAEEKRLAVTERATGDLQRRSRDVAPLPQRRNPPQQPLHVDSICDWDSGEVQLLQGERYKLVDNTDPHAWVVQGPGGETKRAPAACFCIPAPDPDAVARASRLASELQALKQKLATVQSRLKASAVESLRPSQQAPSGSDLANPQAQKLLTQMTRLDGDLGQIERQVLAWARAPLSRPTPLEDLEGRIHSHEGTAQRLQSLGTEKETAQKECEAFLSTRPVGPAALQLPVALNSVKNKFSDVQVLCSLYGEKAKAALDLERQIQDADRVIRGFEATLVQEAPIPAEPGALQERVSELQRQRRELLEQQTCVLRLHRALKASEHACAALQNNFQEFCQDLPRQQRQVRALTDRYHAVGDQLDLREKVVQDAALTYQQFKNCKDNLSSWLEHLPRSQVRPSDGPSQIAYKLQAQKRLTQEIQSRERDRATASHLSQALQAALQDYELQADTYRCSLEPTLAVSAPKRPRVAPLQESIQAQEKNLAKAYTEVAAAQQQLLQQLEFARKMLEKKELSEDIRRTHDAKQGSESPAQAGRESEALKAQLEEERKRVARVQHELEAQRSQLLQLRTQRPLERLEEKEVVEFYRDPQLEGSLSRVKAQVEEEGKRRAGLQADLEVAAQKVVQLESKRKTMQPHLLTKEVTQVERDPGLDSQAAQLRIQIQQLRGEDAVISARLEGLKKELLALEKREVDVKEKVVVKEVVKVEKNLEMVKAAQALRLQMEEDAARRKQAEEAVAKLQARIEDLERAISSVEPKVIVKEVKKVEQDPGLLQESSRLRSLLEEERTKNATLARELSDLHSKYSVVEKQRPKVQLQERVHEIFQVDPETEQEITRLKAKLQEMAGKRSGVEKEVEKLLPDLEVLRAQKPTVEYKEVTQEVVRHERSPEVLREIDRLKAQLNELVNSHGRSQEQLIRLQGERDEWRRERAKVETKTVSKEVVRHEKDPVLEKEAERLRQEVREAAQKRRAAEDAVYELQSKRLLLERRKPEEKVVVQEVVVTQKDPKLREEHSRLSGSLDEEVGRRRQLELEVQQLRAGVEEQEGLLSFQEDRSKKLAVERELRQLTLRIQELEKRPPTVQEKIIMEEVVKLEKDPDLEKSTEALRWDLDQEKTQVTELNRECKNLQVQIDVLQKAKSQEKTIYKEVIRVQKDRVLEDERARVWEMLNRERTARQAREEEARRLRERIDRAETLGRTWSREESELQRARDQADQECGRLQQELRALERQKQQQTLQLQEESKLLSQKTESERQKAAQRGQELSRLEAAILREKDQIYEKERTLRDLHAKVSREELSQETQTRETNLSTKISILEPETGKDMSPYEAYKRGIIDRGQYLQLQELECDWEEVTTSGPCGEESVLLDRKSGKQYSIEAALRCRRISKEEYHLYKDGHLPISEFALLVAGETKPSSSLSIGSIISKSPLASPAPQSTSFFSPSFSLGLGDDSFPIAGIYDTTTDNKCSIKTAVAKNMLDPITGQKLLEAQAATGGIVDLLSRERYSVHKAMERGLIENTSTQRLLNAQKAFTGIEDPVTKKRLSVGEAVQKGWMPRESVLPHLQVQHLTGGLIDPKRTGRIPIQQALLSGMISEELAQLLQDESSYEKDLTDPISKERLSYKEAMGRCRKDPLSGLLLLPAALEGYRCYRSASPTVPRSLR

SEQ ID NO: 276 - protein, 2961 aa, Homo sapiens
MGNAPSHSSEDEAAAAGGEGWGPHQDWAAVSGTTPGPGVAAPALPPAAALLEPARLREAAAALLPTPPCESLVSRHRGALFRWLEERLGRGEESVTLEQFRELLEARGAGCSSEQFEEAFAQFDAEGDGTVDAENMLEALKNSSGANLQGELSHIIRQLQACSLVPGFTDIFSESKEGLDIHSSMILRFLHRNRLSSAVMPYPMLEHCNNMCTMRSSVLKESLDQLVQKEKESPGDLTRSPEMDKLKSVAKCYAYIETSSNSADIDKMTNGETSSYWQSDGSACSHWIRLKMKPDVVLRHLSIAVAATDQSYMPQQVTVAVGRNASDLQEVRDVHIPSNVTGYVTLLENANVSQLYVQINIKRCLSDGCDTRIHGLRAVGFQRVKKSGVSVSDASAIWYWSLLTSLVTASMETNPAFVQTVLHNTQKALRHMPPLSLSPGSTDFSTFLSPNVLEEVDSFLIRITSCCSTPEVELTLLAFALARGSVAKVMSSLCTITDHLDTQYDASSLILSMASVRQNLLLKYGKPLQLTLQACDVKGKEDKSGPENLLVEPWTRDGFLTETGKTRASTIFSTGTESAFQVTQIRIMVRRGGIGAQCGLVFAYNSSSDKFCAEEHFKRFEKYDKWKLQELRQFVKSRIGCSSDDLGEDDPIGWFELEEEWDEADVKLQQCRVAKYLMVKFLCTRQESAERLGVQGLTISGYLRPARAEAEQSVTCAHCRKDTEESVCGATLLLRTLQFIQQLAHDLVQQKESGLKYKSFLDFAGLDLQIFWNFYSKLKQNPREECVSAQTLLLQLLQSCFSVLQGDVLAASEEEKAPIQSPKGVEAAKELYTHLCDVVDKVDGDSVPMEILKQEVRNTLLNGAAIFFPNRQTRRNHLFTMMNVTEQEHKQSLQLTFRSLCTYFSDKDPGGLLLLPEKNDLAKMNISEVLAVMDTLVSVAARECELLMLSGAPGEVGSVLFSLFWSVQGSLLSWCYLQLKSTDSGAKDLAVDLIEKYVGQFLASMRAILESLFSQYSGKTIVERLCNSVFSMAARQLVIFLLDFCTLDIPHCVLLREFSVLTELLKKLCSGPEGGLRKLDVETWQQEQPVVLHTWTKESAHNYENNCHEVSVFVSPGATYFEVEFDDRCETEKRYDYLEFTDARGRKTRYDTKVGTDKWPKKVTFKAGPRLQFLFHSDSSHNEWGYKFTVTACGLPDVAVSWGLDLQLLVSRLMGRLASQCMALKSVRQLGSNMVVPQAKMALVLSSPLWKPVFRHQVCPELELEASWPTHPHRNSKEVKNIPDDPCRHFLLDFAQSEPAQNFCGPYSELFKGFIQACRKQAPKTDIVAGSTIDQAVNATFAALVYRTPDLYEKLQKYVNSGGKIALSEEFAQVYSLADGIRIWMLEMKQKSLMSLGNEAEEKHSSEATEVNPESLAKECIEKSLLLLKFLPTGISSKESCEKLETADETSHLQPLNKRQRTSSVVEEHFQASVSPTEAAPPATGDQSPGLGTQPKLPSSSGLPAADVSPATAEEPLSPSTPTRRPPFTRGRLRLLSFRSMEEARLVPTVKEKYPVLKDVMDFIKDQSLSHRSVVKVLSLRKAQAQSILEVLKITQHCAESLGQPHCFHPPFILFLLELLTCQKDFTNYFGHLEGCGADLHKEIRDTYYQLVLFLVKAVKGFSSLNDRSLLPALSCVQTALLHLLDMGWEPNDLAFFVDIQLPDLLMKMSQENISVHDSVISQWSEEDELADAKQNSEWMDECQDGMFEAWYEKIAQEDPEKQRKMHMFIARYCDLLNVDISCDGCDEIAPWHRYRCLQCSDMDLCKTCFLGGVKPEGHGDDHEMVNMEFTCDHCQGLIIGRRMNCNVCDDFDLCYGCYAAKKYSYGHLPTHSITAHPMVTIRISDRQRLIQPYIHNYSWLLFAALALYSAHLASAEDVDGEKLDPQTRSSATTLRSQCMQLVGDCLMKAHQGKGLKALALLGVLPDGDSSLEDQALPVTVPTGASEEQLEKKAVQGAELSEAGNGKRAVHEEIRPVDFKQRNKADKGVSLSKDPSCQTQISDSPADASPPTGLPDAEDSEVSSQKPIEEKAVTPSPEQVFAECSQKRILGLLAAMLPPLKSGPTVPLIDLEHVLPLMFQVVISNAGHLNETYHLTLGLLGQLIIRLLPAEVDAAVIKVLSAKHNLFAAGDSSIVPDGWKTTHLLFSLGAVCLDSRVGLDWACSMAEILRSLNSAPLWRDVIATFTDHCIKQLPFQLKHTNIFTLLVLVGFPQVLCVGTRCVYMDNANEPHNVIILKHFTEKNRAVIVDVKTRKRKTVKDYQLVQKGGGQECGDSRAQLSQYSQHFAFIASHLLQSSMDSHCPEAVEATWVLSLALKGLYKTLKAHGFEEIRATFLQTDLLKLLVKKCSKGTGFSKTWLLRDLEILSIMLYSSKKEINALAEHGDLELDERGDREEEVERPVSSPGDPEQKKLDPLEGLDEPTRICFLMAHDALNAPLHILRAIYELQMKKTDYFFLEVQKRFDGDELTTDERIRSLAQRWQPSKSLRLEEQSAKAVDTDMIILPCLSRPARCDQATAESNPVTQKLISSTESELQQSYAKQRRSKSAALLHKELNCKSKRAVRDYLFRVNEATAVLYARHVLASLLAEWPSHVPVSEDILELSGPAHMTYILDMFMQLEEKHEWEKILQKVLQGCREDMLGTMALAACQFMEEPGMEVQVRESKHPYNNNTNFEDKVHIPGAIYLSIKFDSQCNTEEGCDELAMSSSSDFQQDRHSFSGSQQKWKDFELPGDTLYYRFTSDMSNTEWGYRFTVTAGHLGRFQTGFEILKQMLSEERVVPHLPLAKIWEWLVGVACRQTGHQRLKAIHLLLRIVRCCGHSDLCDLALLKPLWQLFTHMEYGLFEDVTQPGILLPLHRALTELFFVTENRAQELGVLQDYLLALTTDDHLLRCAAQALQNIAAISLAINYPNKATRLWNVEC

SEQ ID NO: 277 - protein, 1882 aa, Homo sapiens
MVGRGVPLCAAQPAVAEGGPAREPPPLLEVSPRKRLPAGPDQDPCGSRPAPEGAGAGPEQGHSAGGGGWCRHCHTKLVELKRQAWKLVSGPGTTLRDPCLSALLLDKLPAPGALPACRPEAERRCDVCATHLQQLTREAMHLLQAPASHEDLDAPHGGPSLAPPSTTTSSRDTPGPAGPAGRQPGRAGPDRTKGLAWSPGPSVQVSVAPAGLGGALSTVTIQAQQCLEGMWSVSRVNSFLPPACLAEAAVAAVAVADTVRECPPVAGPDGLSKAWGRGGVCTSALVTPTPGSVGGSTGPSAAASFFIRAMQKLSLASKRKKPHPPPPPATRGTSTYPTDFSGVLQLWPPPAPPCLLRAASKTKDNPGSIGKVKVMLRIWPAQGAQRSAEAMSFLKVDPRKKQVILYDPAAGPPGSAGPRRAATAAVPKMFAFDAVFPQDSEQAEVCSGTVADVLQSVVSGADGCIFSFGHMSLGKSYTMIGKDSSPQSLGIVPCAISWLFRLIEERRERTGTRFSVRVSAVEVCGRDQSLRDLLAEVAPGSLQDTQSPGVYLREDPVCGAQLQNQSELRAPTAEKAAFYLDAALAARSTSRAGCGEDARRSSHMLFTLHVYQYRMEKCGRGGMSGGRSRLHLIDLGSCEAAAGRAGEAAGGPLCLSLSALGSVILALVNGAKHVPYRDHRLTMLLRESLATAGCRTTMIAHVSDAPAQHAETLSTVQLAARIHRLRRKKAKYASSSSGGESSCEEGRARRPPHLRPFHPRTVALDPDRTPPCLPGDPDYSSSSEQSCDTVIYVGPGGAALSDRELTDNEGPPDFVPIIPALSRHRPSKGPRDADHFRCSTFAELQERLECMDGNEGPSGGPGGTDGAQASPARGGRKPSPPEAASPRKAVGTPMAASTPRGSSGPDTHQGTPEPCKAIVWGDQREDSSAWPELLVPEKAAVSGGRRPLPSPAPPPPQLLEACRAPEEPGGGGTDGVARTPPVGMSGQVAGSPMLPGATCPRLAAGSRCPERGLLTTTVTLQRPVELNGEDELVFTVVEELSLGALAGAGRPTSLASFDSDCSLRALASGSRPVSIISSINDEFDAYTSQAPEGGPLEGAAWAGSSHGSSISSWLSEVSVCTADSRDPTPQPRFSPDSLAGLDPGGPPALDGSLGDGSSGFLGPDRPDSPGPTWGPCPGEVAAVAPSRPGREPQAGPSRWASAAQTIHSSLPRKPRTASATTRVGCARLGQSPPGRGGLFEDPWLLRVGECDTQAASAGRAPSPTLGSPRLPEAQVMLACAQRVVDGCEVAARAARRPEAVARIPPLRRGATTLGVTTPAVSWGDAPTEVVACSGSLKASPTSKKGLAPKAGFLPRPSGAAPPAPPTRKSSLEQRSSPASAPPHAVNPARVGAAAVLRGEEEPRPSSRADHSVPRATSSLKARASKVEAAHRLAGHASLERYEGLAHSSSKGREAPGRPPRAVPKLGVPPSSPTHGPAPACRSGAAKAVGAPKPPVGGGKGRGLVAGGSRALGPSVKLSTASVTGRSPGGPVAGPRAAPRAGPSVGAKAGRGTVMGTKQALRAAHSRVHELSASGAPGRGGSSWGSADSDSGHDSGVNVGEERPPTGPALPSPYSKVTAPRRPQRYSSGHGSDNSSVLSGELPPAMGRTALFHHSGGSSGYESLRRDSEATGSASSAPDSMSESGAASPGARTRSLKSPKKRATGLQRRRLIPAPLPDTTALGRKPSLPGQWVDLPPPLAGSLKEPFEIKVYEIDDVERLQRPRPTPREAPTQGLACVSTRLRLAERRQQRLREVQAKHKHLCEELAETQGRLMLEPGRWLEQFEVDPELEPESAEYLAALERATAALEQCVNLCKAHVMMVTCFDISVAASAAIPGPQEVDV

SEQ ID NO: 278 - protein, 2923 aa, Homo sapiens
MRSPATGVPLPTPPPPLLLLLLLLLPPPLLGDQVGPCRSLGSRGRGSSGACAPMGWLCPSSASNLWLYTSRCRDAGTELTGHLVPHHDGLRVWCPESEAHIPLPPAPEGCPWSCRLLGIGGHLSPQGKLTLPEEHPCLKAPRLRCQSCKLAQAPGLRAGERSPEESLGGRRKRNVNTAPQFQPPSYQATVPENQPAGTPVASLRAIDPDEGEAGRLEYTMDALFDSRSNQFFSLDPVTGAVTTAEELDRETKSTHVFRVTAQDHGMPRRSALATLTILVTDTNDHDPVFEQQEYKESLRENLEVGYEVLTVRATDGDAPPNANILYRLLEGSGGSPSEVFEIDPRSGVIRTRGPVDREEVESYQLTVEASDQGRDPGPRSTTAAVFLSVEDDNDNAPQFSEKRYVVQVREDVTPGAPVLRVTASDRDKGSNAVVHYSIMSGNARGQFYLDAQTGALDVVSPLDYETTKEYTLRVRAQDGGRPPLSNVSGLVTVQVLDINDNAPIFVSTPFQATVLESVPLGYLVLHVQAIDADAGDNARLEYRLAGVGHDFPFTINNGTGWISVAAELDREEVDFYSFGVEARDHGTPALTASASVSVTVLDVNDNNPTFTQPEYTVRLNEDAAVGTSVVTVSAVDRDAHSVITYQITSGNTRNRFSITSQSGGGLVSLALPLDYKLERQYVLAVTASDGTRQDTAQIVVNVTDANTHRPVFQSSHYTVNVNEDRPAGTTVVLISATDEDTGENARITYFMEDSIPQFRIDADTGAVTTQAELDYEDQVSYTLAITARDNGIPQKSDTTYLEILVNDVNDNAPQFLRDSYQGSVYEDVPPFTSVLQISATDRDSGLNGRVFYTFQGGDDGDGDFIVESTSGIVRTLRRLDRENVAQYVLRAYAVDKGMPPARTPMEVTVTVLDVNDNPPVFEQDEFDVFVEENSPIGLAVARVTATDPDEGTNAQIMYQIVEGNIPEVFQLDIFSGELTALVDLDYEDRPEYVLVIQATSAPLVSRATVHVRLLDRNDNPPVLGNFEILFNNYVTNRSSSFPGGAIGRVPAHDPDISDSLTYSFERGNELSLVLLNASTGELKLSRALDNNRPLEAIMSVLVSDGVHSVTAQCALRVTIITDEMLTHSITLRLEDMSPERFLSPLLGLFIQAVAATLATPPDHVVVFNVQRDTDAPGGHILNVSLSVGQPPGPGGGPPFLPSEDLQERLYLNRSLLTAISAQRVLPFDDNICLREPCENYMRCVSVLRFDSSAPFIASSSVLFRPIHPVGGLRCRCPPGFTGDYCETEVDLCYSRPCGPHGRCRSREGGYTCLCRDGYTGEHCEVSARSGRCTPGVCKNGGTCVNLLVGGFKCDCPSGDFEKPYCQVTTRSFPAHSFITFRGLRQRFHFTLALSFATKERDGLLLYNGRFNEKHDFVALEVIQEQVQLTFSAGESTTTVSPFVPGGVSDGQWHTVQLKYYNKPLLGQTGLPQGPSEQKVAVVTVDGCDTGVALRFGSVLGNYSCAAQGTQGGSKKSLDLTGPLLLGGVPDLPESFPVRMRQFVGCMRNLQVDSRHIDMADFIANNGTVPGCPAKKNVCDSNTCHNGGTCVNQWDAFSCECPLGFGGKSCAQEMANPQHFLGSSLVAWHGLSLPISQPWYLSLMFRTRQADGVLLQAITRGRSTITLQLREGHVMLSVEGTGLQASSLRLEPGRANDGDWHHAQLALGASGGPGHAILSFDYGQQRAEGNLGPRLHGLHLSNITVGGIPGPAGGVARGFRGCLQGVRVSDTPEGVNSLDPSHGESINVEQGCSLPDPCDSNPCPANSYCSNDWDSYSCSCDPGYYGDNCTNVCDLNPCEHQSVCTRKPSAPHGYTCECPPNYLGPYCETRIDQPCPRGWWGHPTCGPCNCDVSKGFDPDCNKTSGECHCKENHYRPPGSPTCLLCDCYPTGSLSRVCDPEDGQCPCKPGVIGRQCDRCDNPFAEVTTNGCEVNYDSCPRAIEAGIWWPRTRFGLPAAAPCPKGSFGTAVRHCDEHRGWLPPNLFNCTSITFSELKGFAERLQRNESGLDSGRSQQLALLLRNATQHTAGYFGSDVKVAYQLATRLLAHESTQRGFGLSATQDVHFTENLLRVGSALLDTANKRHWELIQQTEGGTAWLLQHYEAYASALAQNMRHTYLSPFTIVTPNIVISVVRLDKGNFAGAKLPRYEALRGEQPPDLETTVILPESVFRETPPVVRPAGPGEAQEPEELARRQRRHPELSQGEAVASVIIYRTLAGLLPHNYDPDKRSLRVPKRPIINTPVVSISVHDDEELLPRALDKPVTVQFRLLETEERTKPICVFWNHSILVSGTGGWSARGCEVVFRNESHVSCQCNHMTSFAVLMDVSRRENGEILPLKTLTYVALGVTLAALLLTFFFLTLLRILRSNQHGIRRNLTAALGLAQLVFLLGINQADLPFACTVIAILLHFLYLCTFSWALLEALHLYRALTEVRDVNTGPMRFYYMLGWGVPAFITGLAVGLDPEGYGNPDFCWLSIYDTLIWSFAGPVAFAVSMSVFLYILAARASCAAQRQGFEKKGPVSGLQPSFAVLLLLSATWLLALLSVNSDTLLFHYLFATCNCIQGPFIFLSYVVLSKEVRKALKLACSRKPSPDPALTTKSTLTSSYNCPSPYADGRLYQPYGDSAGSLHSTSRSGKSQPSYIPFLLREESALNPGQGPPGLGDPGSLFLEGQDQQHDPDTDSDSDLSLEDDQSGSYASTHSSDSEEEEEEEEEEAAFPGEQGWDSLLGPGAERLPLHSTPKDGGPGPGKAPWPGDFGTTAKESSGNGAPEERLRENGDALSREGSLGPLPGSSAQPHKGILKKKCLPTISEKSSLLRLPLEQCTGSSRGSSASEGSRGGPPPRPPPRQSLQEQLNGVMPIAMSIKAGTVDEDSSGSEFLFFNFLH

SEQ ID NO: 279 - protein, 2871 aa, Homo sapiens
MRRGRLLEIALGFTVLLASYTSHGADANLEAGNVKETRASRAKRRGGGGHDALKGPNVCGSRYNAYCCPGWKTLPGGNQCIVPICRHSCGDGFCSRPNMCTCPSGQIAPSCGSRSIQHCNIRCMNGGSCSDDHCLCQKGYIGTHCGQPVCESGCLNGGRCVAPNRCACTYGFTGPQCERDYRTGPCFTVISNQMCQGQLSGIVCTKTLCCATVGRAWGHPCEMCPAQPHPCRRGFIPNIRTGACQDVDECQAIPGLCQGGNCINTVGSFECKCPAGHKLNEVSQKCEDIDECSTIPGICEGGECTNTVSSYFCKCPPGFYTSPDGTRCIDVRPGYCYTALTNGRCSNQLPQSITKMQCCCDAGRCWSPGVTVAPEMCPIRATEDFNKLCSVPMVIPGRPEYPPPPLGPIPPVLPVPPGFPPGPQIPVPRPPVEYLYPSREPPRVLPVNVTDYCQLVRYLCQNGRCIPTPGSYRCECNKGFQLDLRGECIDVDECEKNPCAGGECINNQGSYTCQCRAGYQSTLTRTECRDIDECLQNGRICNNGRCINTDGSFHCVCNAGFHVTRDGKNCEDMDECSIRNMCLNGMCINEDGSFKCICKPGFQLASDGRYCKDINECETPGICMNGRCVNTDGSYRCECFPGLAVGLDGRVCVDTHMRSTCYGGYKRGQCIKPLFGAVTKSECCCASTEYAFGEPCQPCPAQNSAEYQALCSSGPGMTSAGSDINECALDPDICPNGICENLRGTYKCICNSGYEVDSTGKNCVDINECVLNSLLCDNGQCRNTPGSFVCTCPKGFIYKPDLKTCEDIDECESSPCINGVCKNSPGSFICECSSESTLDPTKTICIETIKGTCWQTVIDGRCEININGATLKSQCCSSLGAAWGSPCTLCQVDPICGKGYSRIKGTQCEDIDECEVFPGVCKNGLCVNTRGSFKCQCPSGMTLDATGRICLDIRLETCFLRYEDEECTLPIAGRHRMDACCCSVGAAWGTEECEECPMRNTPEYEELCPRGPGFATKEITNGKPFFKDINECKMIPSLCTHGKCRNTIGSFKCRCDSGFALDSEERNCTDIDECRISPDLCGRGQCVNTPGDFECKCDEGYESGFMMMKNCMDIDECQRDPLLCRGGVCHNTEGSYRCECPPGHQLSPNISACIDINECELSAHLCPNGRCVNLIGKYQCACNPGYHSTPDRLFCVDIDECSIMNGGCETFCTNSEGSYECSCQPGFALMPDQRSCTDIDECEDNPNICDGGQCTNIPGEYRCLCYDGFMASEDMKTCVDVNECDLNPNICLSGTCENTKGSFICHCDMGYSGKKGKTGCTDINECEIGAHNCGKHAVCTNTAGSFKCSCSPGWIGDGIKCTDLDECSNGTHMCSQHADCKNTMGSYRCLCKEGYTGDGFTCTDLDECSENLNLCGNGQCLNAPGGYRCECDMGFVPSADGKACEDIDECSLPNICVFGTCHNLPGLFRCECEIGYELDRSGGNCTDVNECLDPTTCISGNCVNTPGSYICDCPPDFELNPTRVGCVDTRSGNCYLDIRPRGDNGDTACSNEIGVGVSKASCCCSLGKAWGTPCEMCPAVNTSEYKILCPGGEGFRPNPITVILEDIDECQELPGLCQGGKCINTFGSFQCRCPTGYYLNEDTRVCDDVNECETPGICGPGTCYNTVGNYTCICPPDYMQVNGGNNCMDMRRSLCYRNYYADNQTCDGELLFNMTKKMCCCSYNIGRAWNKPCEQCPIPSTDEFATLCGSQRPGFVIDIYTGLPVDIDECREIPGVCENGVCINMVGSFRCECPVGFFYNDKLLVCEDIDECQNGPVCQRNAECINTAGSYRCDCKPGYRFTSTGQCNDRNECQEIPNICSHGQCIDTVGSFYCLCHTGFKTNDDQTMCLDINECERDACGNGTCRNTIGSFNCRCNHGFILSHNNDCIDVDECASGNGNLCRNGQCINTVGSFQCQCNEGYEVAPDGRTCVDINECLLEPRKCAPGTCQNLDGSYRCICPPGYSLQNEKCEDIDECVEEPEICALGTCSNTEGSFKCLCPEGFSLSSSGRRCQDLRMSYCYAKFEGGKCSSPKSRNHSKQECCCALKGEGWGDPCELCPTEPDEAFRQICPYGSGIIVGPDDSAVDMDECKEPDVCKHGQCINTDGSYRCECPFGYILAGNECVDTDECSVGNPCGNGTCKNVIGGFECTCEEGFEPGPMMTCEDINECAQNPLLCAFRCVNTYGSYECKCPVGYVLREDRRMCKDEDECEEGKHDCTEKQMECKNLIGTYMCICGPGYQRRPDGEGCVDENECQTKPGICENGRCLNTRGSYTCECNDGFTASPNQDECLDNREGYCFTEVLQNMCQIGSSNRNPVTKSECCCDGGRGWGPHCEICPFQGTVAFKKLCPHGRGFMTNGADIDECKVIHDVCRNGECVNDRGSYHCICKTGYTPDITGTSCVDLNECNQAPKPCNFICKNTEGSYQCSCPKGYILQEDGRSCKDLDECATKQHNCQFLCVNTIGGFTCKCPPGFTQHHTSCIDNNECTSDINLCGSKGICQNTPGSFTCECQRGFSLDQTGSSCEDVDECEGNHRCQHGCQNIIGGYRCSCPQGYLQHYQWNQCVDENECLSAHICGGASCHNTLGSYKCMCPAGFQYEQFSGGCQDINECGSAQAPCSYGCSNTEGGYLCGCPPGYFRIGQGHCVSGMGMGRGNPEPPVSGEMDDNSLSPEACYECKINGYPKRGRKRRSTNETDASNIEDQSETEANVSLASWDVEKTAIFAFNISHVSNKVRILELLPALTTLTNHNRYLIESGNEDGFFKINQKEGISYLHFTKKKPVAGTYSLQISSTPLYKKKELNQLEDKYDKDYLSGELGDNLKMKIQVLLH

SEQ ID NO: 280 - protein, 2045 aa, Homo sapiens
MAGRSHPGPLRPLLPLLVVAACVLPGAGGTCPERALERREEEANVVLTGTVEEILNVDPVQHTYSCKVRVWRYLKGKDLVARESLLDGGNKVVISGFGDPLICDNQVSTGDTRIFFVNPAPPYLWPAHKNELMLNSSLMRITLRNLEEVEFCVEDKPGTHFTPVPPTPPDACRGMLCGFGAVCEPNAEGPGRASCVCKKSPCPSVVAPVCGSDASTYSNECELQRAQCSQQRRIRLLSRGPCGSRDPCSNVTCSFGSTCARSADGLTASCLCPATCRGAPEGTVCGSDGADYPGECQLLRRACARQENVFKKFDGPCDPCQGALPDPSRSCRVNPRTRRPEMLLRPESCPARQAPVCGDDGVTYENDCVMGRSGAARGLLLQKVRSGQCQGRDQCPEPCRFNAVCLSRRGRPRCSCDRVTCDGAYRPVCAQDGRTYDSDCWRQQAECRQQRAIPSKHQGPCDQAPSPCLGVQCAFGATCAVKNGQAACECLQACSSLYDPVCGSDGVTYGSACELEATACTLGREIQVARKGPCDRCGQCRFGALCEAETGRCVCPSECVALAQPVCGSDGHTYPSECMLHVHACTHQISLHVASAGPCETCGDAVCAFGAVCSAGQCVCPRCEHPPPGPVCGSDGVTYGSACELREAACLQQTQIEEARAGPCEQAECGSGGSGSGEDGDCEQELCRQRGGIWDEDSEDGPCVCDFSCQSVPGSPVCGSDGVTYSTECELKKARCESQRGLYVAAQGACRGPTFAPLPPVAPLHCAQTPYGCCQDNITAARGVGLAGCPSACQCNPHGSYGGTCDPATGQCSCRPGVGGLRCDRCEPGFWNFRGIVTDGRSGCTPCSCDPQGAVRDDCEQMTGLCSCKPGVAGPKCGQCPDGRALGPAGCEADASAPATCAEMRCEFGARCVEESGSAHCVCPMLTCPEANATKVCGSDGVTYGNECQLKTIACRQGLQISIQSLGPCQEAVAPSTHPTSASVTVTTPGLLLSQALPAPPGALPLAPSSTAHSQTTPPPSSRPRTTASVPRTTVWPVLTVPPTAPSPAPSLVASAFGESGSTDGSSDEELSGDQEASGGGSGGLEPLEGSSVATPGPPVERASCYNSALGCCSDGKTPSLDAEGSNCPATKVFQGVLELEGVEGQELFYTPEMADPKSELFGETARSIESTLDDLFRNSDVKKDFRSVRLRDLGPGKSVRAIVDVHFDPTTAFRAPDVARALLRQIQVSRRRSLGVRRPLQEHVRFMDFDWFPAFITGATSGAIAAGATARATTASRLPSSAVTPRAPHPSHTSQPVAKTTAAPTTRRPPTTAPSRVPGRRPPAPQQPPKPCDSQPCFHGGTCQDWALGGGFTCSCPAGRGGAVCEKVLGAPVPAFEGRSFLAFPTLRAYHTLRLALEFRALEPQGLLLYNGNARGKDFLALALLDGRVQLRFDTGSGPAVLTSAVPVEPGQWHRLELSRHWRRGTLSVDGETPVLGESPSGTDGLNLDTDLFVGGVPEDQAAVALERTFVGAGLRGCIRLLDVNNQRLELGIGPGAATRGSGVGECGDHPCLPNPCHGGAPCQNLEAGRFHCQCPPGRVGPTCADEKSPCQPNPCHGAAPCRVLPEGGAQCECPLGREGTFCQTASGQDGSGPFLADFNGFSHLELRGLHTFARDLGEKMALEVVFLARGPSGLLLYNGQKTDGKGDFVSLALRDRRLEFRYDLGKGAAVIRSREPVTLGAWTRVSLERNGRKGALRVGDGPRVLGESPVPHTVLNLKEPLYVGGAPDFSKLARAAAVSSGFDGAIQLVSLGGRQLLTPEHVLRQVDVTSFAGHPCTRASGHPCLNGASCVPREAAYVCLCPGGFSGPHCEKGLVEKSAGDVDTLAFDGRTFVEYLNAVTESEKALQSNHFELSLRTEATQGLVLWSGKATERADYVALAIVDGHLQLSYNLGSQPVVLRSTVPVNTNRWLRVVAHREQREGSLQVGNEAPVTGSSPLGATQLDTDGALWLGGLPELPVGPALPKAYGTGFVGCLRDVVVGRHPLHLLEDAVTKPELRPCPTP

SEQ ID NO: 281 - protein, 2769 aa, Homo sapiens
MDVKERKPYRSLTRRRDAERRYTSSSADSEEGKAPQKSYSSSETLKAYDQDARLAYGSRVKDIVPQEAEEFCRTGANFTLRELGLEEVTPPHGTLYRTDIGLPHCGYSMGAGSDADMEADTVLSPEHPVRLWGRSTRSGRSSCLSSRANSNLTLTDTEHENTETDHPGGLQNHARLRTPPPPLSHAHTPNQHHAASINSLNRGNFTPRSNPSPAPTDHSLSGEPPAGGAQEPAHAQENWLLNSNIPLETRNLGKQPFLGTLQDNLIEMDILGASRHDGAYSDGHFLFKPGGTSPLFCTTSPGYPLTSSTVYSPPPRPLPRSTFARPAFNLKKPSKYCNWKCAALSAIVISATLVILLAYFVAMHLFGLNWHLQPMEGQMYEITEDTASSWPVPTDVSLYPSGGTGLETPDRKGKGTTEGKPSSFFPEDSFIDSGEIDVGRRASQKIPPGTFWRSQVFIDHPVHLKFNVSLGKAALVGIYGRKGLPPSHTQFDFVELLDGRRLLTQEARSLEGTPRQSRGTVPPSSHETGFIQYLDSGIWHLAFYNDGKESEVVSFLTTAIESVDNCPSNCYGNGDCISGTCHCFLGFLGPDCGRASCPVLCSGNGQYMKGRCLCHSGWKGAECDVPTNQCIDVACSNHGTCITGTCICNPGYKGESCEEVDCMDPTCSGRGVCVRGECHCSVGWGGTNCETPRATCLDQCSGHGTFLPDTGLCSCDPSWTGHDCSIEICAADCGGHGVCVGGTCRCEDGWMGAACDQRACHPRCAEHGTCRDGKCECSPGWNGEHCTIAHYLDRVVKEGCPGLCNGNGRCTLDLNGWHCVCQLGWRGAGCDTSMETACGDSKDNDGDGLVDCMDPDCCLQPLCHINPLCLGSPNPLDIIQETQVPVSQQNLHSFYDRIKFLVGRDSTHIIPGENPFDGGHACVIRGQVMTSDGTPLVGVNISFVNNPLFGYTISRQDGSFDLVTNGGISIILRFERAPFITQEHTLWLPWDRFFVMETIIMRHEENEIPSCDLSNFARPNPVVSPSPLTSFASSCAEKGPIVPEIQALQEEISISGCKMRLSYLSSRTPGYKSVLRISLTHPTIPFNLMKVHLMVAVEGRLFRKWFAAAPDLSYYFIWDKTDVYNQKVFGLSEAFVSVGYEYESCPDLILWEKRTTVLQGYEIDASKLGGWSLDKHHALNIQSGILHKGNGENQFVSQQPPVIGSIMGNGRRRSISCPSCNGLADGNKLLAPVALTCGSDGSLYVGDFNYIRRIFPSGNVTNILELRNKDFRHSHSPAHKYYLATDPMSGAVFLSDSNSRRVFKIKSTVVVKDLVKNSEVVAGTGDQCLPFDDTRCGDGGKATEATLTNPRGITVDKFGLIYFVDGTMIRRIDQNGIISTLLGSNDLTSARPLSCDSVMDISQVHLEWPTDLAINPMDNSLYVLDNNVVLQISENHQVRIVAGRPMHCQVPGIDHFLLSKVAIHATLESATALAVSHNGVLYIAETDEKKINRIRQVTTSGEISLVAGAPSGCDCKNDANCDCFSGDDGYAKDAKLNTPSSLAVCADGELYVADLGNIRIRFIRKNKPFLNTQNMYELSSPIDQELYLFDTTGKHLYTQSLPTGDYLYNFTYTGDGDITLITDNNGNMVNVRRDSTGMPLWLVVPDGQVYWVTMGTNSALKSVTTQGHELAMMTYHGNSGLLATKSNENGWTTFYEYDSFGRLTNVTFPTGQVSSFRSDTDSSVHVQVETSSKDDVTITTNLSASGAFYTLLQDQVRNSYYIGADGSLRLLLANGMEVALQTEPHLLAGTVNPTVGKRNVTLPIDNGLNLVEWRQRKEQARGQVTVFGRRLRVHNRNLLSLDFDRVTRTEKIYDDHRKFTLRILYDQAGRPSLWSPSSRLNGVNVTYSPGGYIAGIQRGIMSERMEYDQAGRITSRIFADGKTWSYTYLEKSMVLLLHSQRQYIFEFDKNDRLSSVTMPNVARQTLETIRSVGYYRNIYQPPEGNASVIQDFTEDGHLLHTFYLGTGRRVIYKYGKLSKLAETLYDTTKVSFTYDETAGMLKTINLQNEGFTCTIRYRQIGPLIDRQIFRFTEEGMVNARFDYNYDNSFRVTSMQAVINETPLPIDLYRYDDVSGKTEQFGKFGVIYYDINQIITTAVMTHTKHFDAYGRMKEVQYEIFRSLMYWMTVQYDNMGRVVKKELKVGPYANTTRYSYEYDADGQLQTVSINDKPLWRYSYDLNGNLHLLSPGNSARLTPLRYDIRDRITRLGDVQYKMDEDGFLRQRGGDIFEYNSAGLLIKAYNRAGSWSVRYRYDGLGRRVSSKSSHSHHLQFFYADLTNPTKVTHLYNHSSSEITSLYYDLQGHLFAMELSSGDEFYIACDNIGTPLAVFSGTGLMIKQILYTAYGEIYMDTNPNFQIIIGYHGGLYDPLTKLVHMGRRDYDVLAGRWTSPDHELWKHLSSSNVMPFNLYMFKNNNPISNSQDIKCFMTDVNSWLLTFGFQLHNVIPGYPKPDMDAMEPSYELIHTQMKTQEWDNSKSILGVQCEVQKQLKAFVTLERFDQLYGSTITSCQQAPKTKKFASSGSVFGKGVKFALKDGRVTTDIISVANEDGRRVAAILNHAHYLENLHFTIDGVDTHYFVKPGPSEGDLAILGLSGGRRTLENGVNVTVSQINTVLNGRTRRYTDIQLQYGALCLNTRYGTTLDEEKARVLELARQRAVRQAWAREQQRLREGEEGLRAWTEGEKQQVLSTGRVQGYDGFFVISVEQYPELSDSANNIHFMRQSEMGRR

SEQ ID NO: 282 - protein, 2458 aa, Homo sapiens
MISTLATFPPFLHKDIIEYLSTSFLPMAILGSSRREGVPAHVNLSASSMLMIAMQYTSNPVYHCQLLECLMKYKQEVWKDLLYVIAYGPSQVKPPAVQMLFHYWPNLKPPGAISEYRGLQYTAWNPIHCQHIECHNAINKPAVKMCIDPSLSVALGDKPPPLYLCEECSERIAGDHSEWLIDVLLPQAEISAICQKKNCSSHVRRAVVTCFSAGCCGRHGNRPVRYCKRCHSNHHSNEVGAAAETHLYQTSPPPINTRECGAEELVCAVEAVISLLKEAEFHAEQREHELNRRRQLGLSSSHHSLDNADFDNKDDDKHDQRLLSQFGIWFLVSLCTPSENTPTESLARLVAMVFQWFHSTAYMMDDEVGSLVEKLKPQFVTKWLKTVCDVRFDVMVMCLLPKPMEFARVGGYWDKSCSTVTQLKEGLNRILCLIPYNVINQSVWECIMPEWLEAIRTEVPDNQLKEFREVLSKMFDIELCPLPFSMEEMFGFISCRFTGYPSSVQEQALLWLHVLSELDIMVPLQLLISMFSDGVNSVKELANQRKSRVSELAGNLASRRVSVASDPGRRVQHNMLSPFHSPFQSPFRSPLRSPFRSPFKNFGHPGGRTIDFDCEDDEMNLNCFILMFDLLLKQMELQDDGITMGLEHSLSKDIISIINNVFQAPWGGSHTCQKDEKAIECNLCQSSILCYQLACELLERLAPKEESRLVEPTDSLEDSLLSSRPEFIIGPEGEEEENPASKHGENPGNCTEPVEHAAVKNDTERKFCYQQLPVTLRLIYTIFQEMAKFEEPDILFNMLNCLKILCLHGECLYIARKDHPQFLAYIQDHMLIASLWRVVKSEFSQLSSLAVPLLLHALSLPHGADIFWTIINGNFNSKDWKMRFEAVEKVAVICRFLDIHSVTKNHLLKYSLAHAFCCFLTAVEDVNPAVATRAGLLLDTIKRPALQGLCLCLDFQFDTVVKDRPTILSKLLLLHFLKQDIPALSWEFFVNRFETLSLEAQLHLDCNKEFPFPTTITAVRTNVANLSDAALWKIKRARFARNRQKSVRSLRDSVKGPVESKRALSLPETLTSKIRQQSPENDNTIKDLLPEDAGIDHQTVHQLITVLMKFMAKDESSAESDISSAKAFNTVKRHLYVLLGYDQQEGCFMIAPQKMRLSTCFNAFIAGIAQVMDYNINLGKHLLPLVVQVLKYCSCPQLRHYFQQPPRCSLWSLKPHIRQMWLKALLVILYKYPYRDCDISKILLHLIHITVNTLNAQYHSCKPHATAGPLYSDNSNISRYSEKEKGEIELAEYRETGALQDSLLHCVREESIPKKKLRSFKQKSLDIGNADSLLFTLDEHRRKSCIDRCDIEKPPTQAAYIAQRPNDPGRSRQNSATRPDNSEIPENPAMEGFPDARRPVIPEVRLNCMETFEVKVDSPVKPAPKEDLDLIDLSSDSTSGPEKHSILSTSDSDSLVFEPLPPLRIVESDEEEETMNQGDDGPSGKNAASSPSVPSHPSVLSLSTAPLVQVSVEDCSKDFSSKDSGNNQSAGNTDSALITLEDPMDAEGSSKPEELPEFSCGSPLTLKQKRDLLQKSFALPEMSLDDHPDPGTEGEKPGELMPSSGAKTVLLKVPEDAENPTESEKPDTSAESDTEQNPERKVEEDGAEESEFKIQIVPRQRKQRKIAVSAIQREYLDISFNILDKLGEQKDPDPSTKGLSTLEMPRESSSAPTLDAGVPETSSHSSISTQYRQMKRGSLGVLTMSQLMKRQLEHQSSAPHNISNWDTEQIQPGKRQCNVPTCLNPDLEGQPLRMRGATKSSLLSAPSIVSMFVPAPEEFTDEQPTVMTDKCHDCGAILEEYDEETLGLAIVVLSTFIHLSPDLAAPLLLDIMQSVGRLASSTTFSNQAESMMVPGNAAGVAKQFLRCIFHQLAPNGIFPQLFQSTIKDGTFLRTLASSLMDFNELSSIAALSQLLEGLNNKKNLPAGGAMIRCLENIATFMEALPMDSPSSLWTTISNQFQTFFAKLPCVLPLKCSLDSSLRIMICLLKIPSTNATRSLLEPFSKLLSFVIQNAVFTLAYLVELCGLCYRAFTKERDKFYLSRSVVLELLQALKLKSPLPDTNLLLLVQFICADAGTKLAESTILSKQMIASVPGCGTAAMECVRQYINEVLDFMADMHTLTKLKSHMKTCSQPLHEDTFGGHLKVGLAQIAAMDISRGNHRDNKAVIRYLPWLYHPPSAMQQGPKEFIECVSHIRLLSWLLLGSLTHNAVCPNASSPCLPIPLDAGSHVADHLIVILIGFPEQSKTSVLHMCSLFHAFIFAQLWTVYCEQSAVATNLQNQNEFSFTAILTALEFWSRVTPSILQLMAHNKVMVEMVCLHVISLMEALQECNSTIFVKLIPMWLPMIQSNIKHLSAGLQLRLQAIQNHVNHHSLRTLPGSGQSSAGLAALRKWLQCTQFKMAQVEIQSSEAASQFYPL

SEQ ID NO: 283 - protein, 2028 aa, Homo sapiens
MDVTVSELLELFLQSPLVTWVKTFGPFGSGSQDNLTMYMDLVDGIFLNQIMLQIDPRPTNQRINKHVNNDVNLRIQNLTILVRNIKTYYQEVLQQLIVMNLPNVLMIGRDPLSGKSMEEIKKVLLLVLGCAVQCERKEEFIERIKQLDIETQAGIVAHIQEVTHNQENVFDLQWLELPDVAPEELEALSRSMVLHLRRLIDQRDECTELIVDLTQERDYLQAQHPPSPIKSSSADSTPSPTSSLSSEDKQHLAVELADTKARLRRVRQELEDKTEQLVDTRHEVDQLVLELQKVKQENIQLAADARSARAYRDELDSLREKANRVERLELELTRCKEKLHDVDFYKARMEELREDNIILIETKAMLEEQLTAARARGDKVHELEKENLQLKSKLHDLELDRDTDKKRIEELLEENMVLEIAQKQSMNESAHLGWELEQLSKNADLSDASRKSFVFELNECASSRILKLEKENQSLQSTIQGLRDASLVLEESGLKCGELEKENHQLSKKIEKLQTQLEREKQSNQDLETLSEELIREKEQLQSDMETLKADKARQIKDLEQEKDHLNRAMWSLRERSQVSSEARMKDVEKENKALHQTVTEANGKLSQLEFEKRQLHRDLEQAKEKGERAEKLERELQRLQEENGRLARKVTSLETATEKVEALEHESQGLQLENRTLRKSLDTLQNVSLQLEGLERDNKQLDAENLELRRLVETMRFTSTKLAQMERENQQLEREKEELRKNVDLLKALGKKSERLELSYQSVSAENLRLQQSLESSSHKTQTLESELGELEAERQALRRDLEALRLANAQLEGAEKDRKALEQEVAQLEKDKKLLEKEAKRLWQQVELKDAVLDDSTAKLSAVEKESRALDKELARCRDAAGKLKELEKDNRDLTKQVTVHARTLTTLREDLVLEKLKSQQLSSELDKLSQELEKVGLNRELLLQEDDSGSDTKYKILEGRNESALKTTLAMKEEKIVLLEAQMEEKASLNRQLESELQMLKKECETLRQNQGEGQHLQNSFKHPAGKTAASHQGKEAWGPGHKEATMELLRVKDRAIELERNNAALQAEKQLLKEQLQHLETQNVTFSSQILTLQKQSAFLQEHNTTLQTQTAKLQVENSTLSSQSAALTAQYTLLQNHHTAKETENESLQRQQEQLTAAYEALLQDHEHLGTLHERQSAEYEALIRQHSCLKTLHRNLELEHKELGERHGDMLKRKAELEEREKVLTTEREALQQEQRTNALAMGENQRLRGELDRVNFLHHQLKGEYEELHAHTKELKTSLNNAQLELNRWQARFDELKEQHQTMDISLTKLDNHCELLSRLKGNLEEENHHLLSQIQLLSQQNQMLLEQNMENKEQYHEEQKQYIDKLNALRRHKEKLEEKIMDQYKFYDPPPKKKNHWIGAKALVKLIKPKKEGSRERLKSTVDSPPWQLESSDPASPAASQPLRSQAENPDTPALGSNCAEERDAHNGSVGKGPGDLKPKRGSPHRGSLDRTDASTDLAMRSWPSELGSRTCSTSATTTAPSNSTPIARHPGRTKGYNSDDNLCEPSLEFEVPNHRQYVSRPSSLESSRNTSSNSSPLNLKGSSEQLHGRSESFSSEDLIPSRDLATLPREASTPGRNALGRHEYPLPRNGPLPQEGAQKRGTAPPYVGVRPCSASPSSEMVTLEEFLEESNRSSPTHDTPSCRDDLLSDYFRKASDPPAIGGQPGPPAKKEGAKMPTNFVAPTVKMAAPTSEGRPLKPGQYVKPNFRLTEAEAPPSVAPRQAQPPQSLSLGRPRQAPVPPASHAPASRSASLSRAFSLASADLLRASGPEACKQESPQKLGAPEALGGRETGSHTLQSPAPPSSHSLARERTPLVGKAGSSCQGPGPRSRPLDTRRFSLAPPKEERLAPLHQSATAPAIATAGAGAAAAGSGSNSQLLHFSPAAAPAARTKPKAPPRSGEVATITPVRAGLSLSEGDGVPGQGCSEGLPAKSPGRSPDLAPHLGRALEDCSRGSVSKSSPASPEPGGDPQTVWYEYGCV

SEQ ID NO: 284 - protein, 2491 aa, Homo sapiens
MGAAAGRSPHLGPAPARRPQRSLLLLQLLLLVAAPGSTQAQAAPFPELCSYTWEAVDTKNNVLYKINICGSVDIVQCGPSSAVCMHDLKTRTYHSVGDSVLRSATRSLLEFNTTVSCDQQGTNHRVQSSIAFLCGKTLGTPEFVTATECVHYFEWRTTAACKKDIFKANKEVPCYVFDEELRKHDLNPLIKLSGAYLVDDSDPDTSLFINVCRDIDTLRDPGSQLRACPPGTAACLVRGHQAFDVGQPRDGLKLVRKDRLVLSYVREEAGKLDFCDGHSPAVTITFVCPSERREGTIPKLTAKSNCRYEIEWITEYACHRDYLESKTCSLSGEQQDVSIDLTPLAQSGGSSYISDGKEYLFYLNVCGETEIQFCNKKQAAVCQVKKSDTSQVKAAGRYHNQTLRYSDGDLTLIYFGGDECSSGFQRMSVINFECNKTAGNDGKGTPVFTGEVDCTYFFTWDTEYACVKEKEDLLCGATDGKKRYDLSALVRHAEPEQNWEAVDGSQTETEKKHFFINICHRVLQEGKARGCPEDAAVCAVDKNGSKNLGKFISSPMKEKGNIQLSYSDGDDCGHGKKIKTNITLVCKPGDLESAPVLRTSGEGGCFYEFEWHTAAACVLSKTEGENCTVFDSQAGFSFDLSPLTKKNGAYKVETKKYDFYINVCGPVSVSPCQPDSGACQVAKSDEKTWNLGLSNAKLSYYDGMIQLNYRGGTPYNNERHTPRATLITFLCDRDAGVGFPEYQEEDNSTYNFRWYTSYACPEEPLECVVTDPSTLEQYDLSSLAKSEGGLGGNWYAMDNSGEHVTWRKYYINVCRPLNPVPGCNRYASACQMKYEKDQGSFTEVVSISNLGMAKTGPVVEDSGSLLLEYVNGSACTTSDGRQTTYTTRIHLVCSRGRLNSHPIFSLNWECVVSFLWNTEAACPIQTTTDTDQACSIRDPNSGFVFNLNPLNSSQGYNVSGIGKIFMFNVCGTMPVCGTILGKPASGCEAETQTEELKNWKPARPVGIEKSLQLSTEGFITLTYKGPLSAKGTADAFIVRFVCNDDVYSGPLKFLHQDIDSGQGIRNTYFEFETALACVPSPVDCQVTDLAGNEYDLTGLSTVRKPWTAVDTSVDGRKRTFYLSVCNPLPYIPGCQGSAVGSCLVSEGNSWNLGVVQMSPQAAANGSLSIMYVNGDKCGNQRFSTRITFECAQISGSPAFQLQDGCEYVFIWRTVEACPVVRVEGDNCEVKDPRHGNLYDLKPLGLNDTIVSAGEYTYYFRVCGKLSSDVCPTSDKSKVVSSCQEKREPQGFHKVAGLLTQKLTYENGLLKMNFTGGDTCHKVYQRSTAIFFYCDRGTQRPVFLKETSDCSYLFEWRTQYACPPFDLTECSFKDGAGNSFDLSSLSRYSDNWEAITGTGDPEHYLINVCKSLAPQAGTEPCPPEAAACLLGGSKPVNLGRVRDGPQWRDGIIVLKYVDGDLCPDGIRKKSTTIRFTCSESQVNSRPMFISAVEDCEYTFAWPTATACPMKSNEHDDCQVTNPSTGHLFDLSSLSGRAGFTAAYSEKGLVYMSICGENENCPPGVGACFGQTRISVGKANKRLRYVDQVLQLVYKDGSPCPSKSGLSYKSVISFVCRPEAGPTNRPMLISLDKQTCTLFFSWHTPLACEQATECSVRNGSSIVDLSPLIHRTGGYEAYDESEDDASDTNPDFYINICQPLNPMHGVPCPAGAAVCKVPIDGPPIDIGRVAGPPILNPIANEIYLNFESSTPCLADKHFNYTSLIAFHCKRGVSMGTPKLLRTSECDFVFEWETPVVCPDEVRMDGCTLTDEQLLYSFNLSSLSTSTFKVTRDSRTYSVGVCTFAVGPEQGGCKDGGVCLLSGTKGASFGRLQSMKLDYRHQDEAVVLSYVNGDRCPPETDDGVPCVFPFIFNGKSYEECIIESRAKLWCSTTADYDRDHEWGFCRHSNSYRTSSIIFKCDEDEDIGRPQVFSEVRGCDVTFEWKTKVVCPPKKLECKFVQKHKTYDLRLLSSLTGSWSLVHNGVSYYINLCQKIYKGPLGCSERASICRRTTTGDVQVLGLVHTQKLGVIGDKVVVTYSKGYPCGGNKTASSVIELTCTKTVGRPAFKRFDIDSCTYYFSWDSRAACAVKPQEVQMVNGTITNPINGKSFSLGDIYFKLFRASGDMRTNGDNYLYEIQLSSITSSRNPACSGANICQVKPNDQHFSRKVGTSDKTKYYLQDGDLDVVFASSSKCGKDKTKSVSSTIFFHCDPLVEDGIPEFSHETADCQYLFSWYTSAVCPLGVGFDSENPGDDGQMHKGLSERSQAVGAVLSLLLVALTCCLLALLLYKKERRETVISKLTTCCRRSSNVSYKYSKVNKEEETDENETEWLMEEIQLPPPRQGKEGQENGHITTKSVKALSSLHGDDQDSEDEVLTIPEVKVHSGRGAGAESSHPVRNAQSNALQEREDDRVGLVRGEKARKGKSSSAQQKTVSSTKLVSFHDDSDEDLLHI

SEQ ID NO: 285 - protein, 1710 aa, Homo sapiens
MKKIFSKKGESPLGSFARRQRSSAGGGGEPGEGAYSQPGYHVRDRDLGKIHKAASAGNVAKVQQILLLRKNGLNDRDKMNRTALHLACANGHPEVVTLLVDRKCQLNVCDNENRTALMKAVQCQEEKCATILLEHGADPNLADVHGNTALHYAVYNEDISVATKLLLYDANIEAKNKDDLTPLLLAVSGKKQQMVEFLIKKKANVNAVDKLESSHQLISEYKEERIPKHSSQNSNSVDESSEDSLSRLSGKPGVDDSWPTSDDEDLNFDTKNVPKPSLAKLMTASQQSRKNLEATYGTVRTGNRTLFEDRDSDSQDEVVVESLPTTSIKVQCFSHPTYQSPDLLPKPSHKSLANPGLMKEEPTKPGIAKKENGIDIIESAPLEQTNNDNLTYVDEVHKNNRSDMMSALGLGQEEDIESPWDSESISENFPQKYVDPLAGAADGKEKNIGNEQAEDVFYIPSCMSGSRNFKMAKLEDTRNVGMPVAHMESPERYLHLKPTIEMKDSVPNKAGGMKDVQTSKAAEHDLEVASEEEQEREGSENNQPQVEEERKKHRNNEMEVSANIHDGATDDAEDDDDDDGLIQKRKSGETDHQQFPRKENKEYASSGPALQMKEVKSTEKEKRTSKESVNSPVFGKASLLTGGLLQVDDDSSLSEIDEDEGRPTKKTSNEKNKVKNQIQSMDDVDDLTQSSETASEDCELPHSSYKNFMLLIEQLGMECKDSVSLLKIQDAALSCERLLELKKNHCELLTVKIKKMEDKVNVLQRELSETKEIKSQLEHQKVEWERELCSLRFSLNQEEEKRRNADTLYEKIREQLRRKEEQYRKEVEVKQQLELSLQTLEMELRTVKSNLNQVVQERNDAQRQLSREQNARMLQDGILTNHLSKQKEIEMAQKKMNSENSHSHEEEKDLSHKNSMLQEEIAMLRLEIDTIKNQNQEKEKKCFEDLKIVKEKNEDLQKTIKQNEETLTQTISQYNGRLSVLTAENAMLNSKLENEKQSKERLEAEVESYHSRLAAAIHDRDQSETSKRELELAFQRARDECSRLQDKMNFDVSNLKDNNEILSQQLFKTESKLNSLEIEFHHTRDALREKTLGLERVQKDLSQTQCQMKEMEQKYQNEQVKVNKYIGKQESVEERLSQLQSENMLLRQQLDDAHNKADNKEKTVINIQDQFHAIVQKLQAESEKQSLLLEERNKELISECNHLKERQYQYENEKAEREVVVRQLQQELADTLKKQSMSEASLEVTSRYRINLEDETQDLKKKLGQIRNQLQEAQDRHTEAVRCAEKMQDHKQKLEKDNAKLKVTVKKQMDKIEELQKNLLNANLSEDEKEQLKKLMELKQSLECNLDQEMKKNVELEREITGFKNLLKMTRKKLNEYENGEFSFHGDLKTSQFEMDIQINKLKHKIDDLTAELETAGSKCLHLDTKNQILQEELLSMKTVQKKCEKLQKNKKKLEQEVINLRSHIERNMVELGQVKQYKQEIEERARQEIAEKLKEVNLFLQAQAASQENLEQFRENNFASMKSQMELRIKDLESELSKIKTSQEDFNKTELEKYKQLYLEELKVRKSLSSKLTKTNERLAEVNTKLLVEKQQSRSLFTTLTTRPVMEPPCVGNLNNSLDLNRKLIPRENLVISTSNPRASNNSMENYLSKMQQELEKNITRELKEAAAELESGSIASPLGSTDESNLNQDLVWKASREYVQVLKKNYMI

SEQ ID NO: 286 - protein, 2946 aa, Homo sapiens
MASEKPGPGPGLEPQPVGLIAVGAAGGGGGGSGGGGTGGSGMGELRGASGSGSVMLPAGMINPSVPIRNIRMKFAVLIGLIQVGEVSNRDIVETVLNLLVGGEFDLEMNFIIQDAESITCMTELLEHCDVTCQAEIWSMFTAILRKSVRNLQTSTEVGLIEQVLLKMSAVDDMIADLLVDMLGVLASYSITVKELKLLFSMLRGESGIWPRHAVKLLSVLNQMPQRHGPDTFFNFPGCSAAAIALPPIAKWPYQNGFTLNTWFRMDPLNNINVDKDKPYLYCFRTSKGVGYSAHFVGNCLIVTSLKSKGKGFQHCVKYDFQPRKWYMISIVHIYNRWRNSEIRCYVNGQLVSYGDMAWHVNTNDSYDKCFLGSSETADANRVFCGQLGAVYVFSEALNPAQIFAIHQLGPGYKSTFKFKSESDIHLAEHHKQVLYDGKLASSIAFTYNAKATDAQLCLESSPKENASIFVHSPHALMLQDVKAIVTHSIHSAIHSIGGIQVLFPLFAQLDNRQLNDSQVETTVCATLLAFLVELLKSSVAMQEQMLGGKGFLVIGYLLEKSSRVHITRAVLEQFLSFAKYLDGLSHGAPLLKQLCDHILFNPAIWIHTPAKVQLSLYTYLSAEFIGTATIYTTIRRVGTVLQLMHTLKYYYWVINPADSSGITPKGLDGPRPSQKEIISLRAFMLLFLKQLILKDRGVKEDELQSILNYLLTMHEDENIHDVLQLLVALMSEHPASMIPAFDQRNGIRVIYKLLASKSESIWVQALKVLGYFLKHLGHKRKVEIMHTHSLFTLLGERLMLHTNTVTVTTYNTLYEILTEQVCTQVVHKPHPEPDSTVKIQNPMILKVVATLLKNSTPSAELMEVRRLFLSDMIKLFSNSRENRRCLLQCSVWQDWMFSLGYINPKNSEEQKITEMVYNIFRILLYHAIKYEWGGWRVWVDTLSIAHSKVTYEAHKEYLAKMYEEYQRQEEENIKKGKKGNVSTISGLSSQTTGAKGGMEIREIEDLSQSQSPESETDYPVSTDTRDLLMSTKVSDDILGNSDRPGSGVHVEVHDLLVDIKAEKVEATEVKLDDMDLSPETLVGGENGALVEVESLLDNVYSAAVEKLQNNVHGSVGIIKKNEEKDNGPLITLADEKEDLPNSSTSFLFDKIPKQEEKLLPELSSNHIIPNIQDTQVHLGVSDDLGLLAHMTGSVDLTCTSSIIEEKEFKIHTTSDGMSSISERDLASSTKGLEYAEMTATTLETESSSSKIVPNIDAGSIISDTERSDDGKESGKEIRKIQTTTTTQAVQGRSITQQDRDLRVDLGFRGMPMTEEQRRQFSPGPRTTMFRIPEFKWSPMHQRLLTDLLFALETDVHVWRSHSTKSVMDFVNSNENIIFVHNTIHLISQMVDNIIIACGGILPLLSAATSPTGSKTELENIEVTQGMSAETAVTFLSRLMAMVDVLVFASSLNFSEIEAEKNMSSGGLMRQCLRLVCCVAVRNCLECRQRQRDRGNKSSHGSSKPQEVPQSVTATAASKTPLENVPGNLSPIKDPDRLLQDVDINRLRAVVFRDVDDSKQAQFLALAVVYFISVLMVSKYRDILEPQRETTRTGSQPGRNIRQEINSPTSTVVVIPSIPHPSLNHGFLAKLIPEQSFGHSFYKETPAAFPDTIKEKETPTPGEDIQVESSIPHTDSGIGEEQVASILNGAELETSTGPDAMSELLSTLSSEVKKSQESLTENPSETLKPATSISSISQTKGINVKEILKSLVAAPVEIAECGPEPIPYPDPALKRETQAILPMQFHSFDRSVVVPVKKPPPGSLAVTTVGATTAGSGLPTGSTSNIFAATGATPKSMINTTGAVDSGSSSSSSSSSFVNGATSKNLPAVQTVAPMPEDSAENMSITAKLERALEKVAPLLREIFVDFAPFLSRTLLGSHGQELLIEGLVCMKSSTSVVELVMLLCSQEWQNSIQKNAGLAFIELINEGRLLCHAMKDHIVRVANEAEFILNRQRAEDVHKHAEFESQCAQYAADRREEEKMCDHLISAAKHRDHVTANQLKQKILNILTNKHGAWGAVSHSQLHDFWRLDYWEDDLRRRRRFVRNAFGSTHAEALLKAAIEYGTEEDVVKSKKTFRSQAIVNQNAETELMLEGDDDAVSLLQEKEIDNLAGPVVLSTPAQLIAPVVVAKGTLSITTTEIYFEVDEDDSAFKKIDTKVLAYTEGLHGKWMFSEIRAVFSRRYLLQNTALEVFMANRTSVMFNFPDQATVKKVVYSLPRVGVGTSYGLPQARRISLATPRQLYKSSNMTQRWQRREISNFEYLMFLNTIAGRTYNDLNQYPVFPWVLTNYESEELDLTLPGNFRDLSKPIGALNPKRAVFYAERYETWEDDQSPPYHYNTHYSTATSTLSWLVRIEPFTTFFLNANDGKFDHPDRTFSSVARSWRTSQRDTSDVKELIPEFYYLPEMFVNSNGYNLGVREDEVVVNDVDLPPWAKKPEDFVRINRMALESEFVSCQLHQWIDLIFGYKQRGPEAVRALNVFHYLTYEGSVNLDSITDPVLREAMEAQIQNFGQTPSQLLIEPHPPRSSAMHLCFLPQSPLMFKDQMQQDVIMVLKFPSNSPVTHVAANTLPHLTIPAVVTVTCSRLFAVNRWHNTVGLRGAPGYSLDQAHHLPIEMDPLIANNSGVNKRQITDLVDQSIQINAHCFVVTADNRYILICGFWDKSFRVYSTETGKLTQIVFGHWDVVTCLARSESYIGGDCYIVSGSRDATLLLWYWSGRHHIIGDNPNSSDYPAPRAVLTGHDHEVVCVSVCAELGLVISGAKEGPCLVHTITGDLLRALEGPENCLFPRLISVSSEGHCIIYYERGRFSNFSINGKLLAQMEINDSTRAILLSSDGQNLVTGGDNGVVEVWQACDFKQLYIYPGCDAGIRAMDLSHDQRTLITGMASGSIVAFNIDFNRWHYEHQNRY

SEQ ID NO: 287 - protein, 4557 aa, Homo sapiens
MDIIMGHCVGTRPPACCLILLLFKLLATVSQGLPGTGPLGFHFTHSIYNATVYENSAARTYVNSQSRMGITLIDLSWDIKYRIVSGDEEGFFKAEEVIIADFCFLRIRTKGGNSAILNREIQDNYLLIVKGSVRGEDLEAWTKVNIQVLDMNDLRPLFSPTTYSVTIAESTPLRTSVAQVTATDADIGSNGEFYYYFKNKVDLFSVHPTSGVISLSGRLNYDEKNRYDLEILAVDRGMKLYGNNGVSSTAKLYVHIERINEHAPTIHVVTHVPFSLEKEPTYAVVTVDDLDDGANGEIESVSIVAGDPLDQFFLAKEGKWLNEYKIKERKQIDWESFPYGYNLTLQAKDKGSPQKCSALKAVYIGNPTRDTVPIRFEKEVYDVSISEFSPPGVVVAIVKLSPEPIDVEYKLSPGEDAVYFKINPRSGLIVTARPLNTVKKEVYKLEVTNKEGDLKAQVTISIEDANDHTPEFQQPLYDAYVNESVPVGTSVLTVSASDKDKGENGYITYSIASLNLLPFVINQFTGVISTTEELDFESSPEIYRFIVRASDWGSPYRHESEVNVTIRIGNVNDNSPLFEKVACQGVISYDFPVGGHITAVSAIDIDELELVKYKIISGNELGFFYLNPDSGVLQLKKSLTNSGIKNGNFALRITATDGENLADPMSINISVLHGKVSSKSFSCRETRVAQKLAEKLLIKAKANGKLNLEDGFLDFYSINRQGPYFDKSFPSDVAVKEDLPVGANILKIKAYDADSGFNGKVLFTISDGNTDSCFNIDMETGQLKVLMPMDREHTDLYLLNITIYDLGNPQKSSWRLLTINVEDANDNSPVFIQDSYSVNILESSGIGTEIIQVEARDKDLGSNGEVTYSVLTDTQQFAINSSTGIVYVADQLDRESKANYSLKIEARDKAESGQQLFSVVTLKVFLDDVNDCSPAFIPSSYSVKVLEDLPVGTVIAWLETHDPDLGLGGQVRYSLVNDYNGRFEIDKASGAIRLSKELDYEKQQFYNLTVRAKDKGRPVSLSSVSFVEVEVVDVNENLHTPYFPDFAVVGSVKENSRIGTSVLQVTARDEDSGRDGEIQYSIRDGSGLGRFSIDDESGVITAADILDRETMGSYWLTVYATDRGVVPLYSTIEVYIEVEDVNDNAPLTSEPIYYPVVMENSPKDVSVIQIQAEDPDSSSNEKLTYRITSGNPQNFFAINIKTGLITTTSRKLDREQQAEHFLEVTVTDGGPSPKQSTIWVVVQVLDENDNKPQFPEKVYQIKLPERDRKKRGEPIYRAFAFDRDEGPNAEISYSIVDGNDDGKFFIDPKTGMVSSRKQFTAGSYDILTIKAVDNGRPQKSSTARLHIEWIKKPPPSPIPLTFDEPFYNFTVMESDRVTEIVGVVSVQPANTPLWFDIVGGNFDSAFDAEKGVGTIVIAKPLDAEQRSIYNMSVEVTDGTNVAVTQVFIKVLDNNDNGPEFSQPNYDVTISEDVLPDTEILQIEATDRDEKHKLSYTVHSSIDSISMRKFRIDPSTGVLYTAERLDHEAQDKHILNIMVRDQEFPYRRNLARVIVNVEDANDHSPYFTNPLYEASVFESAALGSAVLQVTALDKDKGENAELIYTIEAGNTGNMFKIEPVLGIITICKEPDMTTMGQFVLSIKVTDQGSPPMSATAIVRISVTMSDNSHPKFIHKDYQAEVNENVDIGTSVILISAISQSTLIYEVKDGDINGIFTINPYSGVITTQKALDYERTSSYQLIIQATNMAGMASNATVNIQIVDENDNAPVFLFSQYSGSLSEAAPINSIVRSLDNSPLVIRATDADSNRNALLVYQIVESTAKKFFTVDSSTGAIRTIANLDHETIAHFHFHVHVRDSGSPQLTAESPVEVNIEVTDVNDNPPVFTQAVFETILLLPTYVGVEVLKVSATDPDSEVPPELTYSLMEGSLDHFLIDSNSGVLTIKNNNLSKDHYMLIVKVSDGKFYSTSMVTIMVKEAMDSGLHFTQSFYSTSISENNTNITKVAIVNAVGNRLNEPLKYSILNPGNKFKIKSTSGVIQTTGVPFDREEQELYELVVEASRELDHLRVARVVVRVNIEDINDNSPVFVGLPYYAAVQVDAEPGTLIYQVTAIDKDKGPNGEVTYVLQDDYGHFEINPNSGNVILKEAFNSDLSNIEYGVTILAKDGGKPSLSTSVELPITIVNKAMPVFDKPFYTASVNEDIRMNTPILSINATSPEGQGIIYIIIDGDPFKQFNIDFDTGVLKVVSPLDYEVTSAYKLTIRASDALTGARAEVTVDLLVNDVNDNPPIFDQPTYNTTLSEASLIGTPVLQVVSIDADSENNKMVHYQIVQDTYNSTDYFHIDSSSGLILTARMLDHELVQHCTLKVRSIDSGFPSLSSEVLVHIYISDVNDNPPVFNQLIYESYVSELAPRGHFVTCVQASDADSSDFDRLEYSILSGNDRTSFLMDSKSGVITLSNHRKQRMEPLYSLNVSVSDGLFTSTAQVHIRVLGANLYSPAFSQSTYVAEVRENVAAGTKVIHVRATDGDPGTYGQISYAIINDFAKDRFLIDSNGQVITTERLDRENPLEGDVSIFVRALDGGGRTTFCTVRVIVVDENDNAPQFMTVEYRASVRADVGRGHLVTQVQAIDPDDGANSRITYSLYSEASVSVADLLEIDPDNGWMVTKGNFNQLKNTVLSFFVKAVDGGIPVKHSLIPVYIHVLPPETFLPSFTQSQYSFTIAEDTAIGSTVDTLRILPSQNVWFSTVNGERPENNKGGIFVIEQETGTIKLDKRLDRETSPAFHFKVAATIPLDKVDIVFTVDVDIKVLDLNDNKPVFETSSYDTIIMEGMPVGTKLTQVRAIDMDWGANGQVTYSLHSDSQPEKVMEAFNIDSNTGWISTLKDLDHETDPTFTFSVVASDLGEAFSLSSTALVSVRVTDINDNAPVFAQEVYRGNVKESDPPGEVVAVLSTWDRDTSDVNRQVSYHITGGNPRGRFALGLVQSEWKVYVKRPLDREEQDIYFLNITATDGLFVTQAMVEVSVSDVNDNSPVCDQVAYTALLPEDIPSNKIILKVSAKDADIGSNGYIRYSLYGSGNSEFFLDPESGELKTLALLDRERIPVYSLMAKATDGGGRFCQSNIHLILEDVNDNPPVFSSDHYNTCVYENTATKALLTRVQAVDPDIGINRKVVYSLADSAGGVFSIDSSSGIIILEQPLDREQQSSYNISVRATDQSPGQSLSSLTTVTITVLDINDNPPVFERRDYLVTVPEDTSPGTQVLAVFATSKDIGTNAEITYLIRSGNEQGKFKINPKTGGISVSEVLDYELCKRFYLVVEAKDGGTPALSAVATVNINLTDVNDNPPKFSQDVYSAVISEDALVGDSVILLIAEDVDSQPNGQIHFSIVNGDRDNEFTVDPVLGLVKVKKKLDRERVSGYSLLVQAVDSGIPAMSSTATVNIDISDVNDNSPVFTPANYTAVIQENKPVGTSILQLVVTDRDSFHNGPPFSFSILSGNEEEEFVLDPHGILRSAVVFQHTESLEYVLCVQAKDSGKPQQVSHTYIRVRVIEESTHKPTAIPLEIFIVTMEDDFPGGVIGKIHATDQDMYDVLTFALKSEQKSLFKVNSHDGKIIALGGLDSGKYVLNVSVSDGRFQVPIDVVVHVEQLVHEMLQNTVTIRFENVSPEDFVGLHMHGFRRTLRNAVLTQKQDSLRIISIQPVAGTNQLDMLFAVEMHSSEFYKPAYLIQKLSNARRHLENIMRISAILEKNCSGLDCQEQHCEQGLSLDSHALMTYSTARISFVCPRFYRNVRCTCNGGLCPGSNDPCVEKPCPGDMQCVSYEASRRPFLCQCPPGKLGECSGHTSLSFAGNSYIKYRLSENSKEEDFKLALRLRTLQSNGIIMYTRANPCIILKIVDGKLWFQLDCGSGPGILGISGRAVNDGSWHSVFLELNRNFTSLSLDDSYVERRRAPLYFQTLSTESSIYFGALVQADNIRSLTDTRVTQVLSGFQGCLDSVILNNNELPLQNKRSSFAEVVGLTELKLGCVLYPDACKRSPCQHGGSCTGLPSGGYQCTCLSQFTGRNCESEITACFPNPCRNGGSCDPIGNTFICNCKAGLTGVTCEEDINECEREECENGGSCVNVFGSFLCNCTPGYVGQYCGLRPVVVPNIQAGHSYVGKEELIGIAVVLFVIFILVVLFIVFRKKVFRKNYSRNNITLVQDPATAALLNKSNGIPFRNLRGSGDGRNVYQEVGPPQVPVRPMAYTPCFQSDSRSNLDKIVDGLGGEHQEMTTFHPESPRILTARRGVVVCSVAPNLPAVSPCRSDCDSIRKNGWDAGTENKGVDDPGEVTCFAGSNKGSNSEVQSLSSFQSDSGDDNAYHWDTSDWMPGARLSDIEEVPNYENQDGGSAHQGSTRELESDYYLGGYDIDSEYPPPHEEEFLSQDQLPPPLPEDFPDQYEALPPSQPVSLASTLSPDCRRRPQFHPSQYLPPHPFPNETDLVGPPASCEFSTFAVSMNQGTEPTGPADSVSLSLHNSRGTSSSDVSANCGFDDSEVAMSDYESVGELSLASLHIPFVETQHQTQV

SEQ ID NO: 288 - protein, 2351 aa, Homo sapiens
MFFKMKNEIDNDPESEKCIKDSTIMRREPQNILSPLMLPNLEIPFSVKDIISRIERAQLHRAREDIDMQLSEIMNNVHRIMTRYTLVFNSSSERNVSLTEHKKKQRTNFLEKMATYAKTIEIREKTLANILAWLEEWNDVLSEMTLMDVDEHHHWIAQMELLPDTLKAIENNVKILSRFSTSFLDEKKKQKKKILSRGTLWKSWKERVIKRPSTARALRPDQMISDQLATNTKVSEIQGMLQELIGTTMFSTLENNAIKYISSTIVNLSTALSMLNDELKCVNFQSSTVYAHETSEAEKELSLKIIRDLSNENEMLQQKLQDAEEKCEQLIRSKIVIEQLYAKLSTSSTLKVLPGPSPQSSRAIIKVGDTEDNMDNILDKELENIVDEVQRKETKDSGIKWDSTISYTAQAERTPDLTELRQQPVASEDISEDSTKDNVSLKKGDFYQEDETDEYQSWKRSHKKATYVYETSGPNLSDNKSGQKVSEAKPSQYYELQVLKKKRKEMKSFSEDKSKSPTEAKRKHLSLTETKSQGGKSGTSMMMLEQFRKVKRESPFDKRPTAAEIKVEPTTESLDKEGKGEIRSLVEPLSMIQFDDTAEPQKGKIKGKKHHISSGTITSKEEKTEEKEELTKQVKSHQLVKSLSRVAKETSESTRVLESPDGKSEQSNLEEFQEAIMAFLKQKIDNIGKAFDKKTVPKEEELLKRAEAEKLGIIKAKMEEYFQKVAETVTKILRKYKDTKKEEQVGEKPIKQKKVVSFMPGLHFQKSPISAKSESSTLLSYESTDPVINNLIQMILAEIESERDIPTVSTVQKDHKEKEKQRQEQYLQEGQEQMSGMSLKQQLLGERNLLKEHYEKISENWEEKKAWLQMKEGKQEQQSQKQWQEEEMWKEEQKQATPKQAEQEEKQKQRGQEEEELPKSSLQRLEEGTQKMKTQGLLLEKENGQMRQIQKEAKHLGPHRRREKGKEKQKPERGLEDLERQIKTKDQMQMKETQPKELEKMVIQTPMTLSPRWKSVLKDVQRSYEGKEFQRNLKTLENLPDEKEPISITPPPSLQYSLPGALPISGQPLTKCIHLTPQQAQEVGITLTPQQAQAQGITLTLQQAQELGIPLTPQQAQALEILFTPQQAQALGIPLTPQQTQVQGITLTPQQDQAPGISLTTQQAQKLGIPLTPQQAQALGIPLTPQQAQELGIPLTPQQAQALRVSLTPQQAQELGIPLTPQQAQALGITLTLQQAQQLGIPLTPQQAQALGITLTPKQVQELGIPLTPQQAQALGITLTPKQAQELGIPLNPQQAQTLGIPLTPKQAQALGIPFTPQQAQALGIPLTPQQAQTQEITLTPQQAQALGMPLTTQQAQELGIPLTPQHAQALGMPLTTQQAQELGIPLTPQQAQALGMPLTTQQAQELGIPLTPQQAQELGIPFTPQQAQAQEITLTPQQAQALGMPLTAQQAQELGITLTPQQAQELGIPLTPQQAQALGIPLIPPQAQELGIPLTPQQAQALGILLIPPQAQELGIPLTPQQAQALGIPLIPPQAQELGIPLTPQQVQALGIPLIPPQAQELEIPLTPQQAQALGIPLTPQQAQELGIPLTPQQAQELGIPLTPQQAQAQGIPLTPQQAQALGISLTPQQAQAQGITLTPQQAQALGVPITPVNAWVSAVTLTSEQTHALESPMNLEQAQEQLLKLGVPLTLDKAHTLGSPLTLKQVQWSHRPFQKSKASLPTGQSIISRLSPSLRLSLASSAPTAEKSSIFGVSSTPLQISRVPLNQGPFAPGKPLEMGILSEPGKLGAPQTLRSSGQTLVYGGQSTSAQFPAPQAPPSPGQLPISRAPPTPGQPFIAGVPPTSGQIPSLWAPLSPGQPLVPEASSIPGDLLESGPLTFSEQLQEFQPPATAEQSPYLQAPSTPGQHLATWTLPGRASSLWIPPTSRHPPTLWPSPAPGKPQKSWSPSVAKKRLAIISSLKSKSVLIHPSAPDFKVAQVPFTTKKFQMSEVSDTSEETQILRDTFAIESFRTFQSHFTKYRTPVYQTPYTDERALLTLMKPTTSPSSLTTLLRTSQISPLEWYQKSRFPPIDKPWILSSVSDTKKPKVMVPPSSPQELEEKRYFVDVEAQKKNLILLNQAIKTCGLPSQLHTMARTLIIEILHMDTVQLGYLFRKYIAYRLIQHARNNIMKRLKAIQNTGKGYEARNLHMMLSRLDDYGKKVMQVWTEKQKSLGQKRNQCLKKMIHVFNQLKKIHELNLSQPIPLIIEEKQIPASTTFVQKPFLKLLMEEDRTSDICKKFRQQEDQTEAIWNVDLSTSSYPIAEKTSMHSLWAQLGGYPDIPRLLQLEVQSTFRKSLASLQSRVKKIPK

SEQ ID NO: 289 - protein, 2715 aa, Homo sapiens
MAAAAGGGSCPGPGSARGRFPGRPRGAGGGGGRGGRGNGAERVRVALRRGGGATGPGGAEPGEDTALLRLLGLRRGLRRLRRLWAGPRVQRGRGRGRGRGWGPSRGCVPEEESSDGESDEEEFQGFHSDEDVAPSSLRSALRSQRGRAPRGRGRKHKTTPLPPPRLADVAPTPPKTPARKRGEEGTERMVQALTELLRRAQAPQAPRSRACEPSTPRRSRGRPPGRPAGPCRRKQQAVVVAEAAVTIPKPEPPPPVVPVKHQTGSWKCKEGPGPGPGTPRRGGQSSRGGRGGRGRGRGGGLPFVIKFVSRAKKVKMGQLSLGLESGQGQGQHEESWQDVPQRRVGSGQGGSPCWKKQEQKLDDEEEEKKEEEEKDKEGEEKEERAVAEEMMPAAEKEEAKLPPPPLTPPAPSPPPPLPPPSTSPPPPLCPPPPPPVSPPPLPSPPPPPAQEEQEESPPPVVPATCSRKRGRPPLTPSQRAEREAARAGPEGTSPPTPTPSTATGGPPEDSPTVAPKSTTFLKNIRQFIMPVVSARSSRVIKTPRRFMDEDPPKPPKVEVSPVLRPPITTSPPVPQEPAPVPSPPRAPTPPSTPVPLPEKRRSILREPTFRWTSLTRELPPPPPAPPPPPAPSPPPAPATSSRRPLLLRAPQFTPSEAHLKIYESVLTPPPLGAPEAPEPEPPPADDSPAEPEPRAVGRTNHLSLPRFAPVVTTPVKAEVSPHGAPALSNGPQTQAQLLQPLQALQTQLLPQALPPPQPQLQPPPSPQQMPPLEKARIAGVGSLPLSGVEEKMFSLLKRAKVQLFKIDQQQQQKVAASMPLSPGGQMEEVAGAVKQISDRGPVRSEDESVEAKRERPSGPESPVQGPRIKHVCRHAAVALGQARAMVPEDVPRLSALPLRDRQDLATEDTSSASETESVPSRSRRGKVEAAGPGGESEPTGSGGTLAHTPRRSLPSHHGKKMRMARCGHCRGCLRVQDCGSCVNCLDKPKFGGPNTKKQCCVYRKCDKIEARKMERLAKKGRTIVKTLLPWDSDESPEASPGPPGPRRGAGAGGPREEVVAHPGPEEQDSLLQRKSARRCVKQRPSYDIFEDSDDSEPGGPPAPRRRTPRENELPLPEPEEQSRPRKPTLQPVLQLKARRRLDKDALAPGPFASFPNGWTGKQKSPDGVHRVRVDFKEDCDLENVWLMGGLSVLTSVPGGPPMVCLLCASKGLHELVFCQVCCDPFHPFCLEEAERPLPQHHDTWCCRRCKFCHVCGRKGRGSKHLLECERCRHAYHPACLGPSYPTRATRKRRHWICSACVRCKSCGATPGKNWDVEWSGDYSLCPRCTQLYEKGNYCPICTRCYEDNDYESKMMQCAQCDHWVHAKCEGLSDEDYEILSGLPDSVLYTCGPCAGAAQPRWREALSGALQGGLRQVLQGLLSSKVVGPLLLCTQCGPDGKQLHPGPCGLQAVSQRFEDGHYKSVHSFMEDMVGILMRHSEEGETPDRRAGGQMKGLLLKLLESAFGWFDAHDPKYWRRSTRLPNGVLPNAVLPPSLDHVYAQWRQQEPETPESGQPPGDPSAAFQGKDPAAFSHLEDPRQCALCLKYGDADSKEAGRLLYIGQNEWTHVNCAIWSAEVFEENDGSLKNVHAAVARGRQMRCELCLKPGATVGCCLSSCLSNFHFMCARASYCIFQDDKKVFCQKHTDLLDGKEIVNPDGFDVLRRVYVDFEGINFKRKFLTGLEPDAINVLIGSIRIDSLGTLSDLSDCEGRLFPIGYQCSRLYWSTVDARRRCWYRCRILEYRPWGPREEPAHLEAAEENQTIVHSPAPSSEPPGGEDPPLDTDVLVPGAPERHSPIQNLDPPLRPDSGSAPPPAPRSFSGARIKVPNYSPSRRPLGGVSFGPLPSPGSPSSLTHHIPTVGDPDFPAPPRRSRRPSPLAPRPPPSRWASPPLKTSPQLRVPPPTSVVTALTPTSGELAPPGPAPSPPPPEDLGPDFEDMEVVSGLSAADLDFAASLLGTEPFQEEIVAAGAMGSSHGGPGDSSEEESSPTSRYIHFPVTVVSAPGLAPSATPGAPRIEQLDGVDDGTDSEAEAVQQPRGQGTPPSGPGVVRAGVLGAAGDRARPPEDLPSEIVDFVLKNLGGPGDGGAGPREESLPPAPPLANGSQPSQGLTASPADPTRTFAWLPGAPGVRVLSLGPAPEPPKPATSKIILVNKLGQVFVKMAGEGEPVPPPVKQPPLPPTISPTAPTSWTLPPGPLLGVLPVVGVVRPAPPPPPPPLTLVLSSGPASPPRQAIRVKRVSTFSGRSPPAPPPYKAPRLDEDGEASEDTPQVPGLGSGGFSRVRMKTPTVRGVLDLDRPGEPAGEESPGPLQERSPLLPLPEDGPPQVPDGPPDLLLESQWHHYSGEASSSEEEPPSPDDKENQAPKRTGPHLRFEISSEDGFSVEAESLEGAWRTLIEKVQEARGHARLRHLSFSGMSGARLLGIHHDAVIFLAEQLPGAQRCQHYKFRYHQQGEGQEEPPLNPHGAARAEVYLRKCTFDMFNFLASQHRVLPEGATCDEEEDEVQLRSTRRATSLELPMAMRFRHLKKTSKEAVGVYRSAIHGRGLFCKRNIDAGEMVIEYSGIVIRSVLTDKREKFYDGKGIGCYMFRMDDFDVVDATMHGNAARFINHSCEPNCFSRVIHVEGQKHIVIFALRRILRGEELTYDYKFPIEDASNKLPCNCGAKRCRRFLN

SEQ ID NO: 290 - protein, 2701 aa, Homo sapiens
MTEKMSSFLYIGDIVSLYAEGSVNGFISTLGLVDDRCVVHPEAGDLANPPKKFRDCLFKVCPMNRYSAQKQYWKAKQAKQGNHTEAALLKKLQHAAELEQKQNESENKKLLGEIVKYSNVIQLLHIKSNKYLTVNKRLPALLEKNAMRVSLDAAGNEGSWFYIHPFWKLRSEGDNIVVGDKVVLMPVNAGQPLHASNIELLDNPGCKEVNAVNCNTSWKITLFMKYSSYREDVLKGGDVVRLFHAEQEKFLTCDEYEKKQHIFLRTTLRQSATSATSSKALWEIEVVHHDPCRGGAGQWNSLFRFKHLATGNYLAAELNPDYRDAQNEGKNVRDGVPPTSKKKRQAGEKIMYTLVSVPHGNDIASLFELDATTLQRADCLVPRNSYVRLRHLCTNTWVTSTSIPIDTDEERPVMLKIGTCQTKEDKEAFAIVSVPLSEVRDLDFANDANKVLATTVKKLENGTITQNERRFVTKLLEDLIFFVADVPNNGQEVLDVVITKPNRERQKLMREQNILAQVFGILKAPFKEKAGEGSMLRLEDLGDQRYAPYKYMLRLCYRVLRHSQQDYRKNQEYIAKNFCVMQSQIGYDILAEDTITALLHNNRKLLEKHITAKEIETFVSLLRRNREPRFLDYLSDLCVSNTTAIPVTQELICKFMLSPGNADILIQTKVVSMQADNPMESSILSDDIDDEEVWLYWIDSNKEPHGKAIRHLAQEAKEGTKADLEVLTYYRYQLNLFARMCLDRQYLAINQISTQLSVDLILRCVSDESLPFDLRASFCRLMLHMHVDRDPQESVVPVRYARLWTEIPTKITIHEYDSITDSSRNDMKRKFALTMEFVEEYLKEVVNQPFPFGDKEKNKLTFEVVHLARNLIYFGFYSFSELLRLTRTLLAILDIVQAPMSSYFERLSKFQDGGNNVMRTIHGVGEMMTQMVLSRGSIFPMSVPDVPPSIHPSKQGSPTEHEDVTVMDTKLKIIEILQFILSVRLDYRISYMLSIYKKEFGEDNDNAETSASGSPDTLLPSAIVPDIDEIAAQAETMFAGRKEKNPVQLDDEGGRTFLRVLIHLIMHDYPPLLSGALQLLFKHFSQRAEVLQAFKQVQLLVSNQDVDNYKQIKADLDQLRLTVEKSELWVEKSSNYENGEIGESQVKGGEEPIEESNILSPVQDGTKKPQIDSNKSNNYRIVKEILIRLSKLCVQNKKCRNQHQRLLKNMGAHSVVLDLLQIPYEKNDEKMNEVMNLAHTFLQNFCRGNPQNQVLLHKHLNLFLTPGLLEAETMRHIFMNNYHLCNEISERVVQHFVHCIETHGRHVEYLRFLQTIVKADGKYVKKCQDMVMTELINGGEDVLIFYNDRASFPILLHMMCSERDRGDESGPLAYHITLVELLAACTEGKNVYTEIKCNSLLPLDDIVRVVTHDDCIPEVKIAYVNFVNHCYVDTEVEMKEIYTSNHIWKLFENFLVDMARVCNTTTDRKHADIFLEKCVTESIMNIVSGFFNSPFSDNSTSLQTHQPVFIQLLQSAFRIYNCTWPNPAQKASVESCIRTLAEVAKNRGIAIPVDLDSQVNTLFMKSHSNMVQRAAMGWRLSARSGPRFKEALGGPAWDYRNIIEKLQDVVASLEHQFSPMMQAEFSVLVDVLYSPELLFPEGSDARIRCGAFMSKLINHTKKLMEKEEKLCIKILQTLREMLEKKDSFVEEGNTLRKILLNRYFKGDYSIGVNGHLSGAYSKTAQVGGSFSGQDSDKMGISMSDIQCLLDKEGASELVIDVIVNTKNDRIFSEGIFLGIALLEGGNTQTQYSFYQQLHEQKKSEKFFKVLYDRMKAAQKEIRSTVTVNTIDLGNKKRDDDNELMTSGPRMRVRDSTLHLKEGMKGQLTEASSATSKAYCVYRREMDPEIDIMCTGPEAGNTEEKSAEEVTMSPAIAIMQPILRFLQLLCENHNRELQNFLRNQNNKTNYNLVCETLQFLDCICGSTTGGLGLLGLYINEKNVALVNQNLESLTEYCQGPCHENQTCIATHESNGIDIIIALILNDINPLGKYRMDLVLQLKNNASKLLLAIMESRHDSENAERILFNMRPRELVDVMKNAYNQGLECDHGDDEGGDDGVSPKDVGHNIYILAHQLARHNKLLQQMLKPGSDPDEGDEALKYYANHTAQIEIVRHDRTMEQIVFPVPNICEYLTRESKCRVFNTTERDEQGSKVNDFFQQTEDLYNEMKWQKKIRNNPALFWFSRHISLWGSISFNLAVFINLAVALFYPFGDDGDEGTLSPLFSVLLWIAVAICTSMLFFFSKPVGIRPFLVSIMLRSIYTIGLGPTLILLGAANLCNKIVFLVSFVGNRGTFTRGYRAVILDMAFLYHVAYVLVCMLGLFVHEFFYSFLLFDLVYREETLLNVIKSVTRNGRSIILTAVLALILVYLFSIIGFLFLKDDFTMEVDRLKNRTPVTGSHQVPTMTLTTMMEACAKENCSPTIPASNTADEEYEDGIERTCDTLLMCIVTVLNQGLRNGGGVGDVLRRPSKDEPLFAARVVYDLLFYFIVIIIVLNLIFGVIIDTFADLRSEKQKKEEILKTTCFICGLERDKFDNKTVSFEEHIKSEHNMWHYLYFIVLVKVKDPTEYTGPESYVAQMIVEKNLDWFPRMRAMSLVSNEGDSEQNEIRSLQEKLESTMSLVKQLSGQLAELKEQMTEQRKNKQRLGFLGSNTPHVNHHMPPH

SEQ ID NO: 291 - protein, 2997 aa, Homo sapiens
MADPGMMSLFGEDGNIFSEGLEGLGECGYPENPVNPMGQQMPIDQGFASLQPSLHHPSTNQNQTKLTHFDHYNQYEQQKMHLMDQPNRMMSNTPGNGLASPHSQYHTPPVPQVPHGGSGGGQMGVYPGMQNERHGQSFVDSSSMWGPRAVQVPDQIRAPYQQQQPQPQPPQPAPSGPPAQGHPQHMQQMGSYMARGDFSMQQHGQPQQRMSQFSQGQEGLNQGNPFIATSGPGHLSHVPQQSPSMAPSLRHSVQQFHHHPSTALHGESVAHSPRFSPNPPQQGAVRPQTLNFSSRSQTVPSPTINNSGQYSRYPYSNLNQGLVNNTGMNQNLGLTNNTPMNQSVPRYPNAVGFPSNSGQGLMHQQPIHPSGSLNQMNTQTMHPSQPQGTYASPPPMSPMKAMSNPAGTPPPQVRPGSAGIPMEVGSYPNMPHPQPSHQPPGAMGIGQRNMGPRNMQQSRPFIGMSSAPRELTGHMRPNGCPGVGLGDPQAIQERLIPGQQHPGQQPSFQQLPTCPPLQPHPGLHHQSSPPHPHHQPWAQLHPSPQNTPQKVPVHQHSPSEPFLEKPVPDMTQVSGPNAQLVKSDDYLPSIEQQPQQKKKKKKNNHIVAEDPSKGFGKDDFPGGVDNQELNRNSLDGSQEEKKKKKRSKAKKDPKEPKEPKEKKEPKEPKTPKAPKIPKEPKEKKAKTATPKPKSSKKSSNKKPDSEASALKKKVNKGKTEGSENSDLDKTPPPSPPPEEDEDPGVQKRRSSRQVKRKRYTEDLEFKISDEEADDADAAGRDSPSNTSQSEQQESVDAEGPVVEKIMSSRSVKKQKESGEEVEIEEFYVKYKNFSYLHCQWASIEDLEKDKRIQQKIKRFKAKQGQNKFLSEIEDELFNPDYVEVDRIMDFARSTDDRGEPVTHYLVKWCSLPYEDSTWERRQDIDQAKIEEFEKLMSREPETERVERPPADDWKKSESSREYKNNNKLREYQLEGVNWLLFNWYNMRNCILADEMGLGKTIQSITFLYEIYLKGIHGPFLVIAPLSTIPNWEREFRTWTELNVVVYHGSQASRRTIQLYEMYFKDPQGRVIKGSYKFHAIITTFEMILTDCPELRNIPWRCVVIDEAHRLKNRNCKLLEGLKMMDLEHKVLLTGTPLQNTVEELFSLLHFLEPSRFPSETTFMQEFGDLKTEEQVQKLQAILKPMMLRRLKEDVEKNLAPKEETIIEVELTNIQKKYYRAILEKNFTFLSKGGGQANVPNLLNTMMELRKCCNHPYLINGAEEKILEEFKETHNAESPDFQLQAMIQAAGKLVLIDKLLPKLKAGGHRVLIFSQMVRCLDILEDYLIQRRYPYERIDGRVRGNLRQAAIDRFSKPDSDRFVFLLCTRAGGLGINLTAADTCIIFDSDWNPQNDLQAQARCHRIGQSKSVKIYRLITRNSYEREMFDKASLKLGLDKAVLQSMSGRENATNGVQQLSKKEIEDLLRKGAYGALMDEEDEGSKFCEEDIDQILLRRTHTITIESEGKGSTFAKASFVASGNRTDISLDDPNFWQKWAKKAELDIDALNGRNNLVIDTPRVRKQTRLYSAVKEDELMEFSDLESDSEEKPCAKPRRPQDKSQGYARSECFRVEKNLLVYGWGRWTDILSHGRYKRQLTEQDVETICRTILVYCLNHYKGDENIKSFIWDLITPTADGQTRALVNHSGLSAPVPRGRKGKKVKAQSTQPVVQDADWLASCNPDALFQEDSYKKHLKHHCNKVLLRVRMLYYLRQEVIGDQADKILEGADSSEADVWIPEPFHAEVPADWWDKEADKSLLIGVFKHGYEKYNSMRADPALCFLERVGMPDAKAIAAEQRGTDMLADGGDGGEFDREDEDPEYKPTRTPFKDEIDEFANSPSEDKEESMEIHATGKHSESNAELGQLYWPNTSTLTTRLRRLITAYQRSYKRQQMRQEALMKTDRRRRRPREEVRALEAEREAIISEKRQKWTRREEADFYRVVSTFGVIFDPVKQQFDWNQFRAFARLDKKSDESLEKYFSCFVAMCRRVCRMPVKPDDEPPDLSSIIEPITEERASRTLYRIELLRKIREQVLHHPQLGERLKLCQPSLDLPEWWECGRHDRDLLVGAAKHGVSRTDYHILNDPELSFLDAHKNFAQNRGAGNTSSLNPLAVGFVQTPPVISSAHIQDERVLEQAEGKVEEPENPAAKEKCEGKEEEEETDGSGKESKQECEAEASSVKNELKGVEVGADTGSKSISEKGSEEDEEEKLEDDDKSEESSQPEAGAVSRGKNFDEESNASMSTARDETRDGFYMEDGDPSVAQLLHERTFAFSFWPKDRVMINRLDNICEAVLKGKWPVNRRQMFDFQGLIPGYTPTTVDSPLQKRSFAELSMVGQASISGSEDITTSPQLSKEDALNLSVPRQRRRRRRKIEIEAERAAKRRNLMEMVAQLRESQVVSENGQEKVVDLSKASREATSSTSNFSSLSSKFILPNVSTPVSDAFKTQMELLQAGLSRTPTRHLLNGSLVDGEPPMKRRRGRRKNVEGLDLLFMSHKRTSLSAEDAEVTKAFEEDIETPPTRNIPSPGQLDPDTRIPVINLEDGTRLVGEDAPKNKDLVEWLKLHPTYTVDMPSYVPKNADVLFSSFQKPKQKRHRCRNPNKLDINTLTGEERVPVVNKRNGKKMGGAMAPPMKDLPRWLEENPEFAVAPDWTDIVKQSGFVPESMFDRLLTGPVVRGEGASRRGRRPKSEIARAAAAAAAVASTSGINPLLVNSLFAGMDLTSLQNLQNLQSLQLAGLMGFPPGLATAATAGGDAKNPAAVLPLMLPGMAGLPNVFGLGGLLNNPLSAATGNTTTASSQGEPEDSTSKGEEKGNENEDENKDSEKSTDAVSAADSANGSVGAATAPAGLPSNPLAFNPFLLSTMAPGLFYPSMFLPPGLGGLTLPGFPALAGLQNAVGSSEEKAADKAEGGPFKDGETLEGSDAEESLDKTAESSLLEDEIAQGEELDSLDGGDEIENNENDE

SEQ ID NO: 292 - protein, 3184 aa, Homo sapiens
MEAEDLSKAEDRNEDPGSKNEGQLAAVQPDVPHGGQSSSPTALWDMLERKFLEYQQLTHKSPIERQKSLLSLLPLFLKAWEHSVGIICFPSLQRLAEDVSDQLAQQLQKALVGKPAEQARLAAGQLLWWKGDVDQDGYLLLKSVYVLTGTDSETLGRVAESGLPALLLQCLYLFFVFPLDKDELLESDLQVQKMFVQMLLNICSDSQGLEGLLSGSELQSLLIATTCLREHSCCFWKEPTFCVLRAISKAQNLSIIQYLQATDCVRLSLQNLSRLTDTLPAPEVSEAVSLILGFVKDSYPVSSALFLEFENSEGYPLLLKVLLRYDGLTQSEVDPHLEELLGLVVWLTTCGRSELKVFDSITYPQLEGFKFHHEASGVTVKNLQAFQVLQNVFHKASDSVLCIQVLSVIRTMWAWNARNFFLLEWTLQPISQFVEIMPLKPAPVQEHFFQLLEALVFELHYVPHEILRKVQHLIKESPGPSCTLMALQSILSIAGGDPLFTDIFRDSGLLGLLLAQLRKQAKIMRKSGNKVSTPGVQDPERELTCVMLRIVVTLLKGSVRNAVVLKDHGMVPFIKIFLDDECYREASLSILEQLSAINAEEYMSIIVGALCSSTQGELQLKLDLLKSLLRILVTPKGRAAFRVSSGFNGLLSLLSDLEGSLQEPPLQAWGAVSPRQTLELVLYTLCAVSAALHWDPVNGYFFRRNGLFEKLAEDLCLLGCFGALEEEGNLLRSWVDTKARPFADLLGTAFSSSGSLPPRIQSCLQILGFLDSMASGTLHLRGDLKESLRTKQGPVVDVQKGETGSDPQRNFKQWPDLEERMDEGDAAIMHPGVVCIMVRLLPRLYHEDHPQLSEEIQCSLASHIQSLVKSEKNRQVMCEAGLLGTLMASCHRALVTSGSPLHSRLIRIFEKLASQAIEPDVLRQFLGLGIPSSLSATTKILDSSHTHRGNPGCSGSQTAQGLAEGPWPAAPDAGLHPGVTQAPQPLGESQDSTTALQTALSLISMTSPRNLQPQRAALAPSFVEFDMSVEGYGCLFIPTLSTVMGTSTEYSVSGGIGTGATRPFPPPGGLTFSCWFLISRHGAATEGHPLRFLTLVRHLARTEQPFVCFSVSLCPDDLSLVVSTEEKEFQPLDVMEPEDDSEPSAGCQLQVRCGQLLACGQWHHLAVVVTKEMKRHCTVSTCLDGQVIGSAKMLYIQALPGPFLSMDPSAFVDVYGYIATPRVWKQKSSLIWRLGPTYLFEEAISMETLEVINKLGPRYCGNFQAVHVQGEDLDSEATPFVAEERVSFGLHIASSSITSVADIRNAYNEVDSRLIAKEMNISSRDNAMPVFLLRNCAGHLSGSLRTIGAVAVGQLGVRVFHSSPAASSLDFIGGPAILLGLISLATDDHTMYAAVKVLHSVLTSNAMCDFLMQHICGYQIMAFLLRKKASLLNHRIFQLILSVAGTVELGFRSSAITNTGVFQHILCNFELWMNTADNLELSLFSHLLEILQSPREGPRNAEAAHQAQLIPKLIFLFNEPSLIPSKISTIIGILACQLRGHFSTQDLLRIGLFVVYTLKPSSVNERQICMDGALDPSLPAGSQTSGKTIWLRNQLLEMLLSVISSPQLHLSSESKEEMFLKLGPDWFLLLLQGHLHASTTVLALKLLLYFLASPSLRTRFRDGLCAGSWVERSTEGVDIVMDNLKSQSPLPEQSPCLLPGFRVLNDFLAHHVHIPEVYLIVSTFFLQTPLTELMDGPKDSLDAMLQWLLQRHHQEEVLQAGLCTEGALLLLEMLKATMSQPLAGSEDGAWAQTFPASVLQFLSLVHRTYPQDPAWRAPEFLQTLAIAAFPLGAQKGVGAESTRNTSSPEAAAEGDSTVEGLQAPTKAHPARRKLREFTQLLLRELLLGASSPKQWLPLEVLLEASPDHATSQQKRDFQSEVLLSAMELFHMTSGGDAAMFRDGKEPQPSAEAAAAPSLANISCFTQKLVEKLYSGMFSADPRHILLFILEHIMVVIETASSQRDTVLSTLYSSLNKVILYCLSKPQQSLSECLGLLSILGFLQEHWDVVFATYNSNISFLLCLMHCLLLLNERSYPEGFGLEPKPRMSTYHQVFLSPNEDVKEKREDLPSLSDVQHNIQKTVQTLWQQLVAQRQQTLEDAFKIDLSVKPGEREVKIEEVTPLWEETMLKAWQHYLASEKKSLASRSNVAHHSKVTLWSGSLSSAMKLMPGRQAKDPECKTEDFVSCIENYRRRGQELYASLYKDHVQRRKCGNIKAANAWARIQEQLFGELGLWSQGEETKPCSPWELDWREGPARMRKRIKRLSPLEALSSGRHKESQDKNDHISQTNAENQDELTLREAEGEPDEVGVDCTQLTFFPALHESLHSEDFLELCRERQVILQELLDKEKVTQKFSLVIVQGHLVSEGVLLFGHQHFYICENFTLSPTGDVYCTRHCLSNISDPFIFNLCSKDRSTDHYSCQCHSYADMRELRQARFLLQDIALEIFFHNGYSKFLVFYNNDRSKAFKSFCSFQPSLKGKATSEDTLSLRRYPGSDRIMLQKWQKRDISNFEYLMYLNTAAGRTCNDYMQYPVFPWVLADYTSETLNLANPKIFRDLSKPMGAQTKERKLKFIQRFKEVEKTEGDMTVQCHYYTHYSSAIIVASYLVRMPPFTQAFCALQGGSFDVADRMFHSVKSTWESASRENMSDVRELTPEFFYLPEFLTNCNGVEFGCMQDGTVLGDVQLPPWADGDPRKFISLHRKALESDFVSANLHHWIDLIFGYKQQGPAAVDAVNIFHPYFYGDRMDLSSITDPLIKSTILGFVSNFGQVPKQLFTKPHPARTAAGKPLPGKDVSTPVSLPGHPQPFFYSLQSLRPSQVTVKDMYLFSLGSESPKGAIGHIVSTEKTILAVERNKVLLPPLWNRTFSWGFDDFSCCLGSYGSDKVLMTFENLAAWGRCLCAVCPSPTTIVTSGTSTVVCVWELSMTKGRPRGLRLRQALYGHTQAVTCLAASVTFSLLVSGSQDCTCILWDLDHLTHVTRLPAHREGISAITISDVSGTIVSCAGAHLSLWNVNGQPLASITTAWGPEGAITCCCLMEGPAWDTSQIIITGSQDGMVRVWKTEDVKMSVPGRPAGEEPPAQPPSPRGHKWEKNLALSRELDVSIALTGKPSKTSPAVTALAVSRNHTKLLVGDERGRIFCWSADG

SEQ ID NO: 293 - protein, 1838 aa, Homo sapiens
MDVHTRWKARSALRPGAPLLPPLLLLLLWAPPPSRAAQPADLLKVLDFHNLPDGITKTTGFCATRRSSKGPDVAYRVTKDAQLSAPTKQLYPASAFPEDFSILTTVKAKKGSQAFLVSIYNEQGIQQIGLELGRSPVFLYEDHTGKPGPEDYPLFRGINLSDGKWHRIALSVHKKNVTLILDCKKKTTKFLDRSDHPMIDINGIIVFGTRILDEEVFEGDIQQLLFVSDHRAAYDYCEHYSPDCDTAVPDTPQSQDPNPDEYYTEGDGEGETYYYEYPYYEDPEDLGKEPTPSKKPVEAAKETTEVPEELTPTPTEAAPMPETSEGAGKEEDVGIGDYDYVPSEDYYTPSPYDDLTYGEGEENPDQPTDPGAGAEIPTSTADTSNSSNPAPPPGEGADDLEGEFTEETIRNLDENYYDPYYDPTSSPSEIGPGMPANQDTIYEGIGGPRGEKGQKGEPAIIEPGMLIEGPPGPEGPAGLPGPPGTMGPTGQVGDPGERGPPGRPGLPGADGLPGPPGTMLMLPFRFGGGGDAGSKGPMVSAQESQAQAILQQARLALRGPAGPMGLTGRPGPVGPPGSGGLKGEPGDVGPQGPRGVQGPPGPAGKPGRRGRAGSDGARGMPGQTGPKGDRGFDGLAGLPGEKGHRGDPGPSGPPGPPGDDGERGDDGEVGPRGLPGEPGPRGLLGPKGPPGPPGPPGVTGMDGQPGPKGNVGPQGEPGPPGQQGNPGAQGLPGPQGAIGPPGEKGPLGKPGLPGMPGADGPPGHPGKEGPPGEKGGQGPPGPQGPIGYPGPRGVKGADGIRGLKGTKGEKGEDGFPGFKGDMGIKGDRGEIGPPGPRGEDGPEGPKGRGGPNGDPGPLGPPGEKGKLGVPGLPGYPGRQGPKGSIGFPGFPGANGEKGGRGTPGKPGPRGQRGPTGPRGERGPRGITGKPGPKGNSGGDGPAGPPGERGPNGPQGPTGFPGPKGPPGPPGKDGLPGHPGQRGETGFQGKTGPPGPPGVVGPQGPTGETGPMGERGHPGPPGPPGEQGLPGLAGKEGTKGDPGPAGLPGKDGPPGLRGFPGDRGLPGPVGALGLKGNEGPPGPPGPAGSPGERGPAGAAGPIGIPGRPGPQGPPGPAGEKGAPGEKGPQGPAGRDGLQGPVGLPGPAGPVGPPGEDGDKGEIGEPGQKGSKGDKGEQGPPGPTGPQGPIGQPGPSGADGEPGPRGQQGLFGQKGDEGPRGFPGPPGPVGLQGLPGPPGEKGETGDVGQMGPPGPPGPRGPSGAPGADGPQGPPGGIGNPGAVGEKGEPGEAGEPGLPGEGGPPGPKGERGEKGESGPSGAAGPPGPKGPPGDDGPKGSPGPVGFPGDPGPPGEPGPAGQDGPPGDKGDDGEPGQTGSPGPTGEPGPSGPPGKRGPPGPAGPEGRQGEKGAKGEAGLEGPPGKTGPIGPQGAPGKPGPDGLRGIPGPVGEQGLPGSPGPDGPPGPMGPPGLPGLKGDSGPKGEKGHPGLIGLIGPPGEQGEKGDRGLPGPQGSSGPKGEQGITGPSGPIGPPGPPGLPGPPGPKGAKGSSGPTGPKGEAGHPGPPGPPGPPGEVIQPLPIQASRTRRNIDASQLLDDGNGENYVDYADGMEEIFGSLNSLKLEIEQMKRPLGTQQNPARTCKDLQLCHPDFPDGEYWVDPNQGCSRDSFKVYCNFTAGGSTCVFPDKKSEGARITSWPKENPGSWFSEFKRGKLLSYVDAEGNPVGVVQMTFLRLLSASAHQNVTYHCYQSVAWQDAATGSYDKALRFLGSNDEEMSYDNNPYIRALVDGCATKKGYQKTVLEIDTPKVEQVPIVDIMFNDFGEASQKFGFEVGPACFMG

SEQ ID NO: 294 - protein, 2537 aa, Homo sapiens
MEDFRGIAEESFPSFLTNSLFGNSGILENVTLSSNLGLPVAVSTLARDRSSTDNRYPDIQASYLVEGRFSVPSGSSPGSQSDAEPRERLQLSFQDDDSISRKKSYVESQRLSNALSKQSALQMETAGPEEEPAGATESLQGQDLFNRASPLEQAQDSPIDFHLQSWMNNKEPKIVVLDAGKHFEDKTLKSDLSHTSLLENEKLILPTSLEDSSDDDIDDEMFYDDHLEAYFEQLAIPGMIYEDLEGPEPPEKGFKLPTNGLRQANENGSLNCKFQSENNSSLISLDSHSSETTHKESEESQVICLPGTSNSIGTGDSRRYTDGMLPFSSGTWGTEKEIENLKGIVPDLNSECASKDVLVKTLRAIDVKLNSDNFHDANANRGGFDLTDPVKQGAECPHQNKTVLHMDGCLDTETPTVSIQENVDVASLKPISDSGINFTDAIWSPTCERRTCECHESIEKNKDKTDLPQSVVYQNEEGRWVTDLAYYTSFNSKQNLNVSLSDEMNEDFRSGSEAFDLIAQDEEEFNKEHQFIQEENIDAHNTSVALGDTSWGATINYSLLRKSRSTSDLDKDDASYLRLSLGEFFAQRSEALGCLGGGNNVKRPSFGYFIRSPEKREPIALIRKSDVSRGNLEKEMAHLNHDLYSGDLNEQSQAQLSEGSITLQVEAVESTSQVDENDVTLTADKGKTEDTFFMSNKPQRYKDKLPDSGDSMLRISTIASAIAEASVNTDPSQLAAMIKALSNKTRDKTFQEDEKQKDYSHVRHFLPNDLEKSNGSNALDMEKYLKKTEVSRYESALENFSRASMSDTWDLSLPKEQTTQDIHPVDLSATSVSVRAPEENTAAIVYVENGESENQESFRTINSSNSVTNRENNSAVVDVKTCSIDNKLQDVGNDEKATSISTPSDSYSSVRNPRITSLCLLKDCEEIRDNRENQRQNECVSEISNSEKHVTFENHRIVSPKNSDLKNTSPEHGGRGSEDEQESFRPSTSPLSHSSPSEISGTSSSGCALESFGSAAQQQQPPCEQELSPLVCSPAGVSRLTYVSEPESSYPTTATDDALEDRKSDITSELSTTIIQGSPAALEERAMEKLREKVPFQNRGKGTLSSIIQNNSDTRKATETTSLSSKPEYVKPDFRWSKDPSSKSGNLLETSEVGWTSNPEELDPIRLALLGKSGLSCQVGSATSHPVSCQEPIDEDQRISPKDKSTAGREFSGQVSHQTTSENQCTPIPSSTVHSSVADMQNMPAAVHALLTQPSLSAAPFAQRYLGTLPSTGSTTLPQCHAGNATVCGFSGGLPYPAVAGEPVQNSVAVGICLGSNIGSGWMGTSSLCNPYSNTLNQNLLSTTKPFPVPSVGTNCGIEPWDSGVTSGLGSVRVPEELKLPHACCVGIASQTLLSVLNPTDRWLQVSIGVLSISVNGEKVDLSTYRCLVFKNKAIIRPHATEEIKVLFIPSSPGVFRCTFSVASWPCSTDAETIVQAEALASTVTLTAIAESPVIEVETEKKDVLDFGDLTYGGWKALPLKLINRTHATVPIRLIINANAVAWRCFTFSKESVRAPVEVAPCADVVTRLAGPSVVNHMMPASYDGQDPEFLMIWVLFHSPKKQISSSDILDSAEEFSAKVDIEVDSPNPTPVLRSVSLRARAGIARIHAPRDLQTMHFLAKVASSRKQHLPLKNAGNIEVYLDIKVPEQGSHFSVDPKNLLLKPGEEHEVIVSFTPKDPEACEERILKIFVQPFGPQYEVVLKGEVISSGSKPLSPGPCLDIPSILSNKQFLAWGGVPLGRTQLQKLALRNNSASTTQHLRLLIRGQDQDCFQLQNTFGSEQRLTSNCEIRIHPKEDIFISVLFAPTRLSCMLARLEIKQLGNRSQPGIKFTIPLSGYGGTSNLILEGVKKLSDSYMVTVNGLVPGKESKIVFSVRNTGSRAAFVKAVGFKDSQKKVLLDPKVLRIFPDKFVLKERTQENVTLIYNPSDRGINNKTATELSTVYLFGGDEISRQQYRRALLHKPEMIKQILPEHSVLQNINFVEAFQDELLVTEVYDLPQRPNDVQLFYGSMCKIILSVIGEFRDCISSREFLQPSSKASLESTSDLGASGKHGGNVSLDVLPVKGPQGSPLLSRAARPPLDQLASEEPWTVLPEHLILVAPSPCDMAKTGRFQIVNNSVRLLRFELCWPAHCLTVTPQHGCVAPESKLQILVSPNSSLSTKQSMFPWSGLIYIHCDDGQKKIVKVQIREDLTQVELLTRLTSKPFGILSPVSEPSVSHLVKPMTKPPSTKVEIRNKSITFPTTEPGETSESCLELENHGTTDVKWHLSSLAPPYVKGVDESGDVFRATYAAFRCSPISGLLESHGIQKVSITFLPRGRGDYAQFWDVECHPLKEPHMKHTLRFQLSGQSIEAENEPENACLSTDSLIKIDHLVKPRRQAVSEASARIPEQLDVTARGVYAPEDVYRFRPTSVGESRTLKVNLRNNSFITHSLKFLSPREPFYVKHSKYSLRAQHYINMPVQFKPKSAGKFEALLVIQTDEGKSIAIRLIGEALGKN

SEQ ID NO: 295 - protein, 423 aa, Homo sapiens
MERMLPLLALGLLAAGFCPAVLCHPNSPLDEENLTQENQDRGTHVDLGLASANVDFAFSLYKQLVLKAPDKNVIFSPLSISTALAFLSLGAHNTTLTEILKGLKFNLTETSEAEIHQSFQHLLRTLNQSSDELQLSMGNAMFVKEQLSLLDRFTEDAKRLYGSEAFATDFQDSAAAKKLINDYVKNGTRGKITDLIKDLDSQTMMVLVNYIFFKAKWEMPFDPQDTHQSRFYLSKKKWVMVPMMSLHHLTIPYFRDEELSCTVVELKYTGNASALFILPDQDKMEEVEAMLLPETLKRWRDSLEFREIGELYLPKFSISRDYNLNDILLQLGIEEAFTSKADLSGITGARNLAVSQVVHKAVLDVFEEGTEASAATAVKITLLSALVETRTIVRFNRPFLMIIVPTDTQNIFFMSKVTNPKQA

SEQ ID NO: 296 - protein, 2526 aa, Homo sapiens
MKILLIIFVLIIWTETLADQSPGPGPVYADVVFLVDSSDHLGPKSFPFVKTFINKMINSLPIEANKYRVALAQYSDEFHSEFHLSTFKGRSPMLNHLKKNFQFIGGSLQIGKALQEAHRTYFSAPINGRDRKQFPPILVVLASAESEDEVEEASKALQKDGVKIISVGVQKASEENLKAMATSHFHFNLRTIRDLSTFSQNMTQIIKDVTKYKEGAVDADMQVHFPISCQKDSLADLVFLVDESLGTGGNLRHLQTFLENITSSMDVKENCMRLGLMSYSNSAKTISFLKSSTTQSEFQQQIKNLSIQVGKSNTGAAIDQMRRDGFSESYGSRRAQGVPQIAVLVTHRPSDDEVHDAALNLRLEDVNVFALSIQGANNTQLEEIVSYPPEQTISTLKSYADLETYSTKFLKKLQNEIWSQISTYAEQRNLDKTGCVDTKEADIHFLIDGSSSIQEKQFEQIKRFMLEVTEMFSIGPDKVRVGVVQYSDDTEVEFYITDYSNDIDLRKAIFNIKQLTGGTYTGKALDYILQIIKNGMKDRMSKVPCYLIVLTDGMSTDRVVEPAKRLRAEQITVHAVGIGAANKIELQEIAGKEERVSFGQNFDALKSIKNEVVREICAEKGCEDMKADIMFLVDSSWSIGNENFRKMKIFMKNLLTKIQIGADKTQIGVVQFSDKTKEEFQLNRYFTQQEISDAIDRMSLINEGTLTGKALNFVGQYFTHSKGARLGAKKFLILITDGVAQDDVRDPARILRGKDVTIFSVGVYNANRSQLEEISGDSSLVFHVENFDHLKALERKLIFRVCALHDCKRITLLDVVFVLDHSGSIKKQYQDHMINLTIHLVKKADVGRDRVQFGALKYSDQPNILFYLNTYSNRSAIIENLRKRRDTGGNTYTAKALKHANALFTEEHGSRIKQNVKQMLIVITDGESHDHDQLNDTALELRNKGITIFAVGVGKANQKELEGMAGNKNNTIYVDNFDKLKDVFTLVQERMCTEAPEVCHLQEADVIFLCDGSDRVSNSDFVTMTTFLSDLIDNFDIQSQRMKIGMAQFGSNYQSIIELKNSLTKTQWKTQIQNVSKSGGFPRIDFALKKVSNMFNLHAGGRRNAGVPQTLVVITSGDPRYDVADAVKTLKDLGICVLVLGIGDVYKEHLLPITGNSEKIITFQDFDKLKNVDVKKRIIREICQSCGKTNCFMDIVVGFDISTHVQGQPLFQGHPQLESYLPGILEDISSIKGVSCGAGTEAQVSLAFKVNSDQGFPAKFQIYQKAVFDSLLQVNVSGPTHLNAQFLRSLWDTFKDKSASRGQVLLIFSDGLQSESNIMLENQSDRLREAGLDALLVVSLNTTAHHEFSSFEFGKRFDYRTHLTIGMRELGKKLSQYLGNIAERTCCCTFCKCPGIPGPHGTRGLQAMKGSQGLKGSRGHRGEDGNPGVRGDTGPQGDKGIAGCPGAWGQKGLKGFSGPKGGHGDDGIDGLDGEEGCHGFPGIKGEKGDPGSQGSPGSRGAPGQYGEKGFPGDPGNPGQNNNIKGQKGSKGEQGRQGRSGQKGVQGSPSSRGSRGREGQRGLRGVSGEPGNPGPTGTLGAEGLQGPQGSQGNPGRKGEKGSQGQKGPQGSPGLMGAKGSTGRPGLLGKKGEPGLPGDLGPVGQTGQRGRQGDSGIPGYGQMGRKGVKGPRGFPGDAGQKGDIGNPGIPGGPGPKGFRGLALTVGLKGEEGSRGLPGPPGQRGIKGMAGQPVYSQCDLIRFLREHSPCWKEKCPAYPTELVFALDNSYDVTEESFNKTRDIITSIVNDLNIRENNCPVGARVAMVSYNSGTSYLIRWSDYNRKKQLLQQLSQIKYQDTTEPRDVGNAMRFVTRNVFKRTYAGANVRRVAVFFSNGQTASRSSIITATMEFSALDISPTVFAFDERVFLEAFGFDNTGTFQVIPVPPNGENQTLERLRRCALCYDKCFPNACIREAFLPEDSYMDVVFLIDNSRNIAKDEFKAVKALVSSVIDNFNIASDPLISDSGDRIALLSYSPWESSRRKMGTVKTEFDFITYDNQLLMKNHIQTSFQQLNGEATIGRALLWTTENLFPETPYLRKHKVIFVVSAGENYERKEFVKMMALRAKCQGYVIFVISLGSTRKDDMEELASYPLDQHLIQLGRIHKPDLNYIAKFLKPFLYSVRRGFNQYPPPMLEDACRLINLGGENIQNDGFQFVTELQEDFLGGNGFIGQELNSGRESPFVKTEDNGSDYLVYLPSQMFEPQKLMINYEKDQKSAEIASLTSGHENYGRKEEPDHTYEPGDVSLQEYYMDVAFLIDASQRVGSDEFKEVKAFITSVLDYFHIAPTPLTSTLGDRVAVLSYSPPGYMPNTEECPVYLEFDLVTYNSIHQMKHHLQDSQQLNGDVFIGHALQWTIDNVFVGTPNLRKNKVIFVISAGETNSLDKDVLRNVSLRAKCQGYSIFVFSFGPKHNDKELEELASHPLDHHLVQLGRTHKPDWNYIIKFVKPFVHLIRRAINKYPTEDMKATCVNMTSPNPENGGTENTVLW

SEQ ID NO: 297 - protein, 1692 aa, Homo sapiens
MSSAVGPRGPRPPTVPPPMQELPDLSHLTEEERNIIMAVMDRQKEEEEKEEAMLKCVVRDMAKPAACKTPRNAENQPHQPSPRLHQQFESYKEQVRKIGEEARRYQGEHKDDAPTCGICHKTKFADGCGHLCSYCRTKFCARCGGRVSLRSNNEDKVVMWVCNLCRKQQEILTKSGAWFFGSGPQQTSQDGTLSDTATGAGSEVPREKKARLQERSRSQTPLSTAAASSQDAAPPSAPPDRSKGAEPSQQALGPEQKQASSRSRSEPPRERKKTPGLSEQNGKGALKSERKRVPKTSAQPVEGAVEERERKERRESRRLEKGRSQDYPDTPEKRDEGKAADEEKQRKEEDYQTRYRSDPNLARYPVKPPPEEQQMRMHARVSRARHERRHSDVALPRTEAGAALPEGKAGKRAPAAARASPPDSPRAYSAERTAETRAPGAKQLTNHSPPAPRHGPVPAEAPELKAQEPLRKQSRLDPSSAVLMRKAKREKVETMLRNDSLSSDQSESVRPSPPKPHRSKRGGKKRQMSVSSSEEEGVSTPEYTSCEDVELESESVSEKGDLDYYWLDPATWHSRETSPISSHPVTWQPSKEGDRLIGRVILNKRTTMPKDSGALLGLKVVGGKMTDLGRLGAFITKVKKGSLADVVGHLRAGDEVLEWNGKPLPGATNEEVYNIILESKSEPQVEIIVSRPIGDIPRIPESSHPPLESSSSSFESQKMERPSISVISPTSPGALKDAPQVLPGQLSVKLWYDKVGHQLIVNVLQATDLPARVDGRPRNPYVKMYFLPDRSDKSKRRTKTVKKILEPKWNQTFVYSHVHRRDFRERMLEITVWDQPRVQEEESEFLGEILIELETALLDDEPHWYKLQTHDESSLPLPQPSPFMPRRHIHGESSSKKLQRSQRISDSDISDYEVDDGIGVVPPVGYRSSARESKSTTLTVPEQQRTTHHRSRSVSPHRGNDQGKPRSRLPNVPLQRSLDEIHPTRRSRSPTRHHDASRSPVDHRTRDVDSQYLSEQDSELLMLPRAKRGRSAECLHTTRHLVRHYKTLPPKMPLLQSSSHWNIYSSILPAHTKTKSVTRQDISLHHECFNSTVLRFTDEILVSELQPFLDRARSASTNCLRPDTSLHSPERERGRWSPSLDRRRPPSPRIQIQHASPENDRHSRKSERSSIQKQTRKGTASDAERVLPTCLSRRGHAAPRATDQPVIRGKHPARSRSSEHSSIRTLCSMHHLVPGGSAPPSPLLTRMHRQRSPTQSPPADTSFSSRRGRQLPQVPVRSGSIEQASLVVEERTRQMKMKVHRFKQTTGSGSSQELDREQYSKYNIHKDQYRSCDNVSAKSSDSDVSDVSAISRTSSASRLSSTSFMSEQSERPRGRISSFTPKMQGRRMGTSGRSIMKSTSVSGEMYTLEHNDGSQSDTAVGTVGAGGKKRRSSLSAKVVAIVSRRSRSTSQLSQTESGHKKLKSTIQRSTETGMAAEMRKMVRQPSRESTDGSINSYSSEGNLIFPGVRLGADSQFSDFLDGLGPAQLVGRQTLATPAMGDIQIGMEDKKGQLEVEVIRARSLTQKPGSKSTPAPYVKVYLLENGACIAKKKTRIARKTLDPLYQQSLVFDESPQGKVLQVIVWGDYGRMDHKCFMGVAQILLEELDLSSMVIGWYKLFPPSSLVDPTLTPLTRRASQSSLESSTGPPCIRS

SEQ ID NO: 298 - protein, 5762 aa, Homo sapiens
MGAPSACRTLVLALAAMLVVPQAETQGPVEPSWENAGHTMDGGAPTSSPTRRVSFVPPVTVFPSLSPLNPAHNGRVCSTWGDFHYKTFDGDVFRFPGLCNYVFSEHCRAAYEDFNVQLRRGLVGSRPVVTRVVIKAQGLVLEASNGSVLINGQREELPYSRTGLLVEQSGDYIKVSIRLVLTFLWNGEDSALLELDPKYANQTCGLCGDFNGLPAFNEFYAHNARLTPLQFGNLQKLDGPTEQCPDPLPLPAGNCTDEEGICHRTLLGPAFAECHALVDSTAYLAACAQDLCRCPTCPCATFVEYSRQCAHAGGQPRNWRCPELCPRTCPLNMQHQECGSPCTDTCSNPQRAQLCEDHCVDGCFCPPGTVLDDITHSGCLPLGQCPCTHGGRTYSPGTSFNTTCSSCTCSGGLWQCQDLPCPGTCSVQGGAHISTYDEKLYDLHGDCSYVLSKKCADSSFTVLAELRKCGLTDNENCLKAVTLSLDGGDTAIRVQADGGVFLNSIYTQLPLSAANITLFTPSSFFIVVQTGLGLQLLVQLVPLMQVFVRLDPAHQGQMCGLCGNFNQNQADDFTALSGVVEATGAAFANTWKAQAACANARNSFEDPCSLSVENENYARHWCSRLTDPNSAFSRCHSIINPKPFHSNCMFDTCNCERSEDCLCAALSSYVHACAAKGVQLSDWRDGVCTKYMQNCPKSQRYAYVVDACQPTCRGLSEADVTCSVSFVPVDGCTCPAGTFLNDAGACVPAQECPCYAHGTVLAPGEVVHDEGAVCSCTGGKLSCLGASLQKSTGCAAPMVYLDCSNSSAGTPGAECLRSCHTLDVGCFSTHCVSGCVCPPGLVSDGSGGCIAEEDCPCVHNEATYKPGETIRVDCNTCTCRNRRWECSHRLCLGTCVAYGDGHFITFDGDRYSFEGSCEYILAQDYCGDNTTHGTFRIVTENIPCGTTGTTCSKAIKLFVESYELILQEGTFKAVARGPGGDPPYKIRYMGIFLVIETHGMAVSWDRKTSVFIRLHQDYKGRVCGLCGNFDDNAINDFATRSRSVVGDALEFGNSWKLSPSCPDALAPKDPCTANPFRKSWAQKQCSILHGPTFAACRSQVDSTKYYEACVNDACACDSGGDCECFCTAVAAYAQACHDAGLCVSWRTPDTCPLFCDFYNPHGGCEWHYQPCGAPCLKTCRNPSGHCLVDLPGLEGCYPKCPPSQPFFNEDQMKCVAQCGCYDKDGNYYDVGARVPTAENCQSCNCTPSGIQCAHSLEACTCTYEDRTYSYQDVIYNTTDGLGACLIAICGSNGTIIRKAVACPGTPATTPFTFTTAWVPHSTTSPALPVSTVCVREVCRWSSWYNGHRPEPGLGGGDFETFENLRQRGYQVCPVLADIECRAAQLPDMPLEELGQQVDCDRMRGLMCANSQQSPPLCHDYELRVLCCEYVPCGPSPAPGTSPQPSLSASTEPAVPTPTQTTATEKTTLWVTPSIRSTAALTSQTGSSSGPVTVTPSAPGTTTCQPRCQWTEWFDEDYPKSEQLGGDVESYDKIRAAGGHLCQQPKDIECQAESFPNWTLAQVGQKVHCDVHFGLVCRNWEQEGVFKMCYNYRIRVLCCSDDHCRGRATTPPPTTELETATTTTTQALFSTPQPTSSPGLTRAPPASTTAVPTLSEGLTSPRYTSTLGTATTGGPTTPAGSTEPTVPGVATSTLPTRSALPGTTGSLGTWRPSQPPTLAPTTMATSRARPTGTASTASKEPLTTSLAPTLTSELSTSQAETSTPRTETTMSPLTNTTTSQGTTRCQPKCEWTEWFDVDFPTSGVAGGDMETFENIRAAGGKMCWAPKSIECRAENYPEVSIDQVGQVLTCSLETGLTCKNEDQTGRFNMCFNYNVRVLCCDDYSHCPSTPATSSTATPSSTPGTTWILTKPTTTATTTASTGSTATPTSTLRTAPPPKVLTTTATTPTVTSSKATPSSSPGTATALPALRSTATTPTATSVTPIPSSSLGTTWTRLSQTTTPTATMSTATPSSTPETAHTSTVLTATATTTGATGSVATPSSTPGTAHTTKVPTTTTTGFTATPSSSPGTALTPPVWISTTTTPTTRGSTVTPSSIPGTTHTATVLTTTTTTVATGSMATPSSSTQTSGTPPSLTTTATTITATGSTTNPSSTPGTTPIPPVLTTTATTPAATSNTVTPSSALGTTHTPPVPNTMATTHGRSLPPSSPHTVRTAWTSATSGILGTTHITEPSTVTSHTLAATTGTTQHSTPALSSPHPSSRTTESPPSPGTTTPGHTTATSRTTATATPSKTRTSTLLPSSPTSAPITTVVTMGCEPQCAWSEWLDYSYPMPGPSGGDFDTYSNIRAAGGAVCEQPLGLECRAQAQPGVPLRELGQVVECSLDFGLVCRNREQVGKFKMCFNYEIRVFCCNYGHCPSTPATSSTAMPSSTPGTTWILTELTTTATTTESTGSTATPSSTPGTTWILTEPSTTATVTVPTGSTATASSTQATAGTPHVSTTATTPTVTSSKATPFSSPGTATALPALRSTATTPTATSFTAIPSSSLGTTWTRLSQTTTPTATMSTATPSSTPETVHTSTVLTTTATTTGATGSVATPSSTPGTAHTTKVLTTTTTGFTATPSSSPGTARTLPVWISTTTTPTTRGSTVTPSSIPGTTHTPTVLTTTTTTVATGSMATPSSSTQTSGTPPSLTTTATTITATGSTTNPSSTPGTTPIPPVLTTTATTPAATSSTVTPSSALGTTHTPPVPNTTATTHGRSLSPSSPHTVRTAWTSATSGTLGTTHITEPSTGTSHTPAATTGTTQHSTPALSSPHPSSRTTESPPSPGTTTPGHTRATSRTTATATPSKTRTSTLLPSSPTSAPITTVVTMGCEPQCAWSEWLDYSYPMPGPSGGDFDTYSNIRAAGGAVCEQPLGLECRAQAQPGVPLRELGQVVECSLDFGLVCRNREQVGKFKMCFNYEIRVFCCNYGHCPSTPATSSTATPSSTPGTTWILTEQTTAATTTATTGSTAIPSSTPGTAPPPKVLTSTATTPTATSSKATSSSSPRTATTLPVLTSTATKSTATSFTPIPSFTLGTTGTLPEQTTTPMATMSTIHPSSTPETTHTSTVLTTKATTTRATSSMSTPSSTPGTTWILTELTTAATTTAATGPTATPSSTPGTTWILTEPSTTATVTVPTGSTATASSTRATAGTLKVLTSTATTPTVISSRATPSSSPGTATALPALRSTATTPTATSVTAIPSSSLGTAWTRLSQTTTPTATMSTATPSSTPETVHTSTVLTTTTTTTRATGSVATPSSTPGTAHTTKVPTTTTTGFTATPSSSPGTALTPPVWISTTTTPTTRGSTVTPSSIPGTTHTATVLTTTTTTVATGSMATPSSSTQTSGTPPSLTTTATTITATGSTTNPSSTPGTTPIPPVLTTTATTPAATSSTVTPSSALGTTHTPPVPNTTATTHGRSLPPSSPHTVRTAWTSATSGILGTTHITEPSTVTSHTPAATTSTTQHSTPALSSPHPSSRTTESPPSPGTTTPGHTRGTSRTTATATPSKTRTSTLLPSSPTSAPITTVVTTGCEPQCAWSEWLDYSYPMPGPSGGDFDTYSNIRAAGGAVCEQPLGLECRAQAQPGVPLRELGQVVECSLDFGLVCRNREQVGKFKMCFNYEIRVFCCNYGHCPSTPATSSTATPSSTPGTTWILTKLTTTATTTESTGSTATPSSTPGTTWILTEPSTTATVTVPTGSTATASSTQATAGTPHVSTTATTPTVTSSKATPFSSPGTATALPALRSTATTPTATSFTAIPSSSLGTTWTRLSQTTTPTATMSTATPSSTPETAHTSTVLTTTATTTRATGSVATPSSTPGTAHTTKVPTTTTTGFTVTPSSSPGTARTPPVWISTTTTPTTSGSTVTPSSVPGTTHTPTVLTTTTTTVATGSMATPSSSTQTSGTPPSLITTATTITATGSTTNPSSTPGTTPIPPVLTTTATTPAATSSTVTPSSALGTTHTPPVPNTTATTHGRSLSPSSPHTVRTAWTSATSGTLGTTHITEPSTGTSHTPAATTGTTQHSTPALSSPHPSSRTTESPPSPGTTTPGHTTATSRTTATATPSKTRTSTLLPSSPTSAPITTVVTTGCEPQCAWSEWLDYSYPMPGPSGGDFDTYSNIRAAGGAVCEQPLGLECRAQAQPGVPLGELGQVVECSLDFGLVCRNREQVGKFKMCFNYEIRVFCCNYGHCPSTPATSSTAMPSSTPGTTWILTELTTTATTTASTGSTATPSSTPGTAPPPKVLTSPATTPTATSSKATSSSSPRTATTLPVLTSTATKSTATSVTPIPSSTLGTTGTLPEQTTTPVATMSTIHPSSTPETTHTSTVLTTKATTTRATSSTSTPSSTPGTTWILTELTTAATTTAATGPTATPSSTPGTTWILTELTTTATTTASTGSTATPSSTPGTTWILTEPSTTATVTVPTGSTATASSTQATAGTPHVSTTATTPTVTSSKATPSSSPGTATALPALRSTATTPTATSFTAIPSSSLGTTWTRLSQTTTPTATMSTATPSSTPETVHTSTVLTATATTTGATGSVATPSSTPGTAHTTKVPTTTTTGFTATPSSSPGTALTPPVWISTTTTPTTTTPTTSGSTVTPSSIPGTTHTARVLTTTTTTVATGSMATPSSSTQTSGTPPSLTTTATTITATGSTTNPSSTPGTTPITPVLTSTATTPAATSSKATSSSSPRTATTLPVLTSTATKSTATSFTPIPSSTLWTTWTVPAQTTTPMSTMSTIHTSSTPETTHTSTVLTTTATMTRATNSTATPSSTLGTTRILTELTTTATTTAATGSTATLSSTPGTTWILTEPSTIATVMVPTGSTATASSTLGTAHTPKVVTTMATMPTATASTVPSSSTVGTTRTPAVLPSSLPTFSVSTVSSSVLTTLRPTGFPSSHFSTPCFCRAFGQFFSPGEVIYNKTDRAGCHFYAVCNQHCDIDRFQGACPTSPPPVSSAPLSSPSPAPGCDNAIPLRQVNETWTLENCTVARCVGDNRVVLLDPKPVANVTCVNKHLPIKVSDPSQPCDFHYECECICSMWGGSHYSTFDGTSYTFRGNCTYVLMREIHARFGNLSLYLDNHYCTASATAAAARCPRALSIHYKSMDIVLTVTMVHGKEEGLILFDQIPVSSGFSKNGVLVSVLGTTTMRVDIPALGVSVTFNGQVFQARLPYSLFHNNTEGQCGTCTNNQRDDCLQRDGTTAASCKDMAKTWLVPDSRKDGCWAPTGTPPTASPAAPVSSTPTPTPCPPQPLCDLMLSQVFAECHNLVPPGPFFNACISDHCRGRLEVPCQSLEAYAELCRARGVCSDWRGATGGLCDLTCPPTKVYKPCGPIQPATCNSRNQSPQLEGMAEGCFCPEDQILFNAHMGICVQACPCVGPDGFPKFPGERWVSNCQSCVCDEGSVSVQCKPLPCDAQGQPPPCNRPGFVTVTRPRAENPCCPETVCVCNTTTCPQSLPVCPPGQESICTQEEGDCCPTFRCRPQLCSYNGTFYGVGATFPGALPCHMCTCLSGDTQDPTVQCQEDACNNTTCPQGFEYKRVAGQCCGECVQTACLTPDGQPVQLNETWVNSHVDNCTVYLCEAEGGVHLLTPQPASCPDVSSCRGSLRKTGCCYSCEEDSCQVRINTTILWHQGCETEVNITFCEGSCPGASKYSAEAQAMQHQCTCCQERRVHEETVPLHCPNGSAILHTYTHVDECGCTPFCVPAPMAPPHTRGFPAQEATAV

SEQ ID NO: 299 - protein, 1983 aa, Homo sapiens
MSGNKRGSRASCPHRGAECLLPWAALNLQGFQLLLLHPSATAMMDVSELGESARYLRQGYQEMTKVHTIPWDGKKRVWVPDEQDAYVEAEVKSEATGGRVTVETKDQKVLMVREAELQPMNPPRFDLLEDMAMMTHLNEASVLHNLRQRYARWMIYTYSGLFCVTINPYKWLPVYTASVVAAYKGKRRSDSPPHIYAVADNAYNDMLRNRDNQSMLITGESGAGKTVNTKRVIQYFAIVAALGDGPGKKAQFLATKTGGTLEDQIIEANPAMEAFGNAKTLRNDNSSRFGKFIRIHFGPSGKLASADIDSYLLEKSRVIFQLPGERSYHVYYQILSGRKPELQDMLLLSMNPYDYHFCSQGVITVDNMNDGEELIATDHAMDILGFSVDEKCACYKIVGALLHFGNMKFKQKQREEQAEADGTESADKAAYLMGVSSGDLLKGLLHPRVRVGNEYVTKGQSVEQVVFAVGALAKATYDRLFRWLVSRINQTLDTKLPRQFFIGVLDIAGFEIFEFNSFEQLCINFTNEKLQQFFNQHMFVLEQEEYKREGIDWVFIDFGLDLQPCIDLIEKPLGILSILEEECMFPKASDASFRAKLYDNHAGKSPNFQQPRPDKKRKYQAHFEVVHYAGVVPYSIVGWLEKNKDPLNETVVPIFQKSQNRLLATLYENYAGSCSTEPPKSGVKEKRKKAASFQTVSQLHKENLNKLMTNLRATQPHFVRCIVPNENKTPGVMDAFLVLHQLRCNGVLEGIRICRQGFPNRLLYTDFRQRYRILNPSAIPDDTFMDSRKATEKLLGSLDLDHTQYQFGHTKVFFKAGLLGVLEELRDQRLAKVLTLLQARSRGRLMRLEYQRLLGGRDALFTIQWNIRAFNAVKNWSWMKLFFKMKPLLRSAQAEEELAALRAELRGLRGALAAAEAKRQELEETHVSITQEKNDLALQLQAEQDNLADAEERCHLLIKSKVQLEGKVKELSERLEDEEEVNADLAARRRKLEDECTELKKDIDDLKLTLAKAEKEKQATENKVKNLTEEMAALDESVARLTKEKKALQEAHQQALGDLQAEEDRVSALTKAKLRLEQQVEDLECSLEQEKKLRMDTERAKRKLEGDLKLTQESVADAAQDKQQLEEKLKKKDSELSQLSLRVEDEQLLGAQMQKKIKELQARAEELEEELEAERAARARVEKQRAEAARELEELSERLEEAGGASAGQREGCRKREAELGRLRRELEEAALRHEATVAALRRKQAEGAAELGEQVDSLQRVRQKLEKEKSELRMEVDDLAANVETLTRAKASAEKLCRTYEDQLSEAKIKVEELQRQLADASTQRGRLQTESGELSRLLEEKECLISQLSRGKALAAQSLEELRRQLEEESKAKSALAHAVQALRHDCDLLREQHEEEAEAQAELQRLLSKANAEVAQWRSKYEADAIQRTEELEEAKKKLALRLQEAEEGVEAANAKCSSLEKAKLRLQTESEDVTLELERATSAAAALDKKQRHLERALEERRRQEEEMQRELEAAQRESRGLGTELFRLRHGHEEALEALETLKRENKNLQEEISDLTDQVSLSGKSIQELEKTKKALEGEKSEIQAALEEAEGALELEETKTLRIQLELSQVKAEVDRKLAEKDEECANLRRNHQRAVESLQASLDAETRARNEALRLKKKMEGDLNDLELQLGHATRQATEAQAATRLMQAQLKEEQAGRDEEQRLAAELHEQAQALERRASLLAAELEELRAALEQGERSRRLAEQELLEATERLNLLHSQNTGLLNQKKKLEADLAQLSGEVEEAAQERREAEEKAKKAITDAAMMAEELKKEQDTSAHLERMKKTLEQTVRELQARLEEAEQAALRGGKKQVQKLEAKVRELEAELDAEQKKHAEALKGVRKHERRVKELAYQAEEDRKNLARMQDLVDKLQSKVKSYKRQFEEAEQQANTNLAKYRKAQHELDDAEERADMAETQANKLRARTRDALGPKHKE

SEQ ID NO: 300 - protein, 4265 aa, Homo sapiens
MEQPNSKGYSLGRTPQGPECSSAPAVQVGTHRGLEYNPGKILPGSDYGLGNPPALDPKLPHLPLPPAPPTLSDLGQPRKSPLTGTDKKYPLMKQRGFYSDILSPGTLDQLGEVCRGPRMSQNLLRQADLDKFTPRVGSFEVPEDFQERMEQQCIGSTTRLLAQTDFPLQAYEPKMQVPFQVLPGQHPRKIEIERRKQQYLSLDIEQLLFSQGIDSNKLMPRHLDHQHPQTIEQGHDPIFPIYLPLKVFDNEDFDCRTPREWINMGLEPGSLDRKPVPGKALLPTDDFLGHEDPKSQKLKYKWCEVGVLDYDEEKKLYLVHKTDEKGLVRDEMGRPILNAGVTTEGRPPLQVCQYWVPRIQLLFCAEDPCMFAQRVVQANALRKNTEALLLYNLYVDCMPSDGQHVISEQSLSKIKQWALSTPRMRKGPSVLEHLSSLAREVSLDYERSMNKINFDHVVSSKPETFSYVTLPKKEEEQVPERGLVSVPKYHFWEQKEDFTFVSLLTRPEVITALSKVRAECNKVTAMSLFHSSLSKYSHLEEFEQIQSQTFSQVQMFLKDSWISSLKVAMRSSLRDMSKGWYNLYETNWEVYLMSKLRKLMELVKYMLQDTLRFLVQDSLASFSQFISDTCCSVLNCTDDMVWGDDLINSPYRPRKNPLFIMDLVLDSSGVHYSTPLEQFEASLLNLFDKGILATHAVPQLEKLVMEDIFISGDPLLESVGLHEPLVEELRATIASAVSKAMIPLQAYAKEYRKYLELNNNDIASFLKTYQTQGLLAQEVREVVLTHLREKEILDSSLPSSIIIGPFYINTDNVKQSLSKKRKALATSVLDILAKNLHKEVDSICEEFRSISRKIYEKPNSIEELAELREWMKGIPERLVGLEERIVKVMDDYQVMDEFLYNLSSDDFNDKWIASNWPSKILGQIELVQQQHVEDEEKFRKIQIMDQNNFQEKLEGLQLVVAGFSIHVEISRAHEIANEVRRVKKQLKDCQQLAMLYNNRERIFSLPITNYDKLSRMVKEFQPYLDLWTTASDWLRWSESWMNDPLSAIDAEQLEKNVVEAFKTMHKCVKQFKDMPACQEVALDIRARIEEFKPYIPLIQGLRNPGMRIRHWETLSNQININVRPKANLTFARCLEMNLQDHIESISKVAEVAGKEYAIEQALDKMEKEWSTILFNVLPYKATDTYILKSPDEASQLLDDHIVMTQNMSFSPYKKPFEQRINSWENKLKLTQEVLEEWLNCQRSWLYLEPIFSSEDINQQLPVESKRYQTMERIWKKIMKNAYENREVINVCSDLRMLDSLRDCNKILDLVQKGLSEYLETKRSAFPRFYFLSDDELLEILSQTKDPTAVQPHLRKCFENIARLLFQEDLEITHMYSAEGEEVQLCFSIYPSSNVEDWLREVERSMKASVHDIIEKAIRAYPTMPRTQWVLNWPGQVTIAGCQTYWTMEVAEALEAGNLRSQLFPQLCQQLSDLVALVRGKLSRMQRAVLSALIVIEVHAKDVVSKLIQENVVSVNDFQWISQLRYYWTNNDLYIRAVNAEFIYGYEYLGNSGRLVITPLTDRCYLTLTGALHLKFGGAPAGPAGTGKTETTKDLGKALAIQTVVFNCSDQLDFMAMGKFFKGLASAGAWACFDEFNRIDIEVLSVVAQQITTIQKAQQQRVERFMFEGVEIPLVPSCAVFITMNPGYAGRTELPDNLKALFRPVAMMVPDYAMITEISLYSFGFNEASVLAKKITTTFKLSSEQLSSQDHYDFGMRAVKTVISAAGNLKRENPSMNEELICLRAIRDVNVPKFLQEDLKLFSGIVSDLFPTIKEEDTDYGILDEAIREACRNSNLKDVEGFLTKCIQLYETTVVRHGLMLVGPTGSGKSTCYRVLAAAMTSLKGQPSISGGMYEAVNYYVLNPKSITMGQLYGEFDLLTHEWTDGIFSSFIRAGAITSDTNKKWYMFDGPVDAIWIENMNTVLDDNKKLCLSSGEIIKLTEAMTMMFEVQDLAVASPATVSRCGMVYLEPSILGLMPFIECWLRKLPPLLKPYEEHFKALFVSFLEESISFVRSSVKEVIASTNCNLTMSLLKLLDCFFKPFLPREGLKKIPSEKLSRIVELIEPWFIFSLIWSVGATGDSSGRTSFSHWLRLKMENEQLTLLFPEEGLVFDYRLEDAGISGTNDSEDEEEEYKQVAWVKWMDSSAPFTMVPDTNYCNIIVPTMDTVQMSHLLDMLLTNKKPVLCIGPTGTGKTLTISDKLLKNLALDYISHFLTFSARTSANQTQDFIDSKLDKRRKGVFGPPLGRNFIFFIDDLNMPALETYGAQPPIELLRQWMDHGGWYDRKIIGAFKNLVDINFVCAMGPPGGGRNTVTPRLMRHFNYLSFAEMDEVSKKRIFSTILGNWLDGLLGEKSYRERVPGAPHIAHFTEPLVEATIMVYATITSQLLPTPAKSHYTFNLRDLSKVFQGMLMADPAKVEDQVQLLRLWYHENCRVFRDRLVNEEDRSWFDQLLKRCMEQWEVTFNKVCPFQPILYGDFMSPGSDVKSYELITSESKMMQVIEEYIEDYNQINTAKLKLVLFMDAMSHICRISRTLRQALGNALLLGVGGSGRSSLTRLASHMAEYECFQIELSKNYGMSEWRDDVKKVLLKAGLQNLPITFLFSDTQIKNESFLEDINNVLNSGDIPNLYTADEQDQIVSTMRPYIQEQGLQPTKANLMAAYTGRVRSNIHMVLCMSPIGEVFRARLRQFPSLVNCCTIDWFNEWPAEALKSVATVFLNEIPELESSQEEIQGLIQVCVYIHQSVSKKCIEYLAELTRHNYVTPKSYLELLHIFSILIGQKKLELKTAKNRMKSGLDKLLRTSEDVAKMQEDLESMHPLLEEAAKDTMLTMEQIKVDTAIAEETRNSVQTEEIKANEKAKKAQAIADDAQKDLDEALPALDAALASLRNLNKNDVTEVRAMQRPPPGVKLVIEAVCIMKGIKPKKVPGEKPGTKVDDYWEPGKGLLQDPGHFLESLFKFDKDNIGDVVIKAIQPYIDNEEFQPATIAKVSKACTSICQWVRAMHKYHFVAKAVEPKRQALLEAQDDLGVTQRILDEAKQRLREVEDGIATMQAKYRECITKKEELELKCEQCEQRLGRAGKLINGLSDEKVRWQETVENLQYMLNNISGDVLVAAGFVAYLGPFTGQYRTVLYDSWVKQLRSHNVPHTSEPTLIGTLGNPVKIRSWQIAGLPNDTLSVENGVINQFSQRWTHFIDPQSQANKWIKNMEKDNGLDVFKLSDRDFLRSMENAIRFGKPCLLENVGEELDPALEPVLLKQTYKQQGNTVLKLGDTVIPYHEDFRMYITTKLPNPHYTPEISTKLTLINFTLSPSGLEDQLLGQVVAEERPDLEEAKNQLIISNAKMRQELKDIEDQILYRLSSSEGNPVDDMELIKVLEASKMKAAEIQAKVRIAEQTEKDIDLTRMEYIPVAIRTQILFFCVSDLANVDPMYQYSLEWFLNIFLSGIANSERADNLKKRISNINRYLTYSLYSNVCRSLFEKHKLMFAFLLCVRIMMNEGKINQSEWRYLLSGGSISIMTENPAPDWLSDRAWRDILALSNLPTFSSFSSDFVKHLSEFRVIFDSLEPHREPLPGIWDQYLDQFQKLLVLRCLRGDKVTNAMQDFVATNLEPRFIEPQTANLSVVFKDSNSTTPLIFVLSPGTDPAADLYKFAEEMKFSKKLSAISLGQGQGPRAEAMMRSSIERGKWVFFQNCHLAPSWMPALERLIEHINPDKVHRDFRLWLTSLPSNKFPVSILQNGSKMTIEPPRGVRANLLKSYSSLGEDFLNSCHKVMEFKSLLLSLCLFHGNALERRKFGPLGFNIPYEFTDGDLRICISQLKMFLDEYDDIPYKVLKYTAGEINYGGRVTDDWDRRCIMNILEDFYNPDVLSPEHSYSASGIYHQIPPTYDLHGYLSYIKSLPLNDMPEIFGLHDNANITFAQNETFALLGTIIQLQPKSSSAGSQGREEIVEDVTQNILLKVPEPINLQWVMAKYPVLYEESMNTVLVQEVIRYNRLLQVITQTLQDLLKALKGLVVMSSQLELMAASLYNNTVPELWSAKAYPSLKPLSSWVMDLLQRLDFLQAWIQDGIPAVFWISGFFFPQAFLTGTLQNFARKFVISIDTISFDFKVMFEAPSELTQRPQVGCYIHGLFLEGARWDPEAFQLAESQPKELYTEMAVIWLLPTPNRKAQDQDFYLCPIYKTLTRAGTLSTTGHSTNYVIAVEIPTHQPQRHWIKRGVALICALDY

SEQ ID NO: 301 - protein, 3433 aa, Homo sapiens
MAKYGEHEASPDNGQNEFSDIIKSRSDEHNDVQKKTFTKWINARFSKSGKPPINDMFTDLKDGRKLLDLLEGLTGTSLPKERGSTRVHALNNVNRVLQVLHQNNVELVNIGGTDIVDGNHKLTLGLLWSIILHWQVKDVMKDVMSDLQQTNSEKILLSWVRQTTRPYSQVNVLNFTTSWTDGLAFNAVLHRHKPDLFSWDKVVKMSPIERLEHAFSKAQTYLGIEKLLDPEDVAVQLPDKKSIIMYLTSLFEVLPQQVTIDAIREVETLPRKYKKECEEEAINIQSTAPEEEHESPRAETPSTVTEVDMDLDSYQIALEEVLTWLLSAEDTFQEQDDISDDVEEVKDQFATHEAFMMELTAHQSSVGSVLQAGNQLITQGTLSDEEEFEIQEQMTLLNARWEALRVESMDRQSRLHDVLMELQKKQLQQLSAWLTLTEERIQKMETCPLDDDVKSLQKLLEEHKSLQSDLEAEQVKVNSLTHMVVIVDENSGESATAILEDQLQKLGERWTAVCRWTEERWNRLQEINILWQELLEEQCLLKAWLTEKEEALNKVQTSNFKDQKELSVSVRRLAILKEDMEMKRQTLDQLSEIGQDVGQLLDNSKASKKINSDSEELTQRWDSLVQRLEDSSNQVTQAVAKLGMSQIPQKDLLETVRVREQAITKKSKQELPPPPPPKKRQIHVDIEAKKKFDAISAELLNWILKWKTAIQTTEIKEYMKMQDTSEMKKKLKALEKEQRERIPRADELNQTGQILVEQMGKEGLPTEEIKNVLEKVSSEWKNVSQHLEDLERKIQLQEDINAYFKQLDELEKVIKTKEEWVKHTSISESSRQSLPSLKDSCQRELTNLLGLHPKIEMARASCSALMSQPSAPDFVQRGFDSFLGRYQAVQEAVEDRQQHLENELKGQPGHAYLETLKTLKDVLNDSENKAQVSLNVLNDLAKVEKALQEKKTLDEILENQKPALHKLAEETKALEKNVHPDVEKLYKQEFDDVQGKWNKLKVLVSKDLHLLEEIALTLRAFEADSTVIEKWMDGVKDFLMKQQAAQGDDAGLQRQLDQCSAFVNEIETIESSLKNMKEIETNLRSGPVAGIKTWVQTRLGDYQTQLEKLSKEIATQKSRLSESQEKAANLKKDLAEMQEWMTQAEEEYLERDFEYKSPEELESAVEEMKRAKEDVLQKEVRVKILKDNIKLLAAKVPSGGQELTSELNVVLENYQLLCNRIRGKCHTLEEVWSCWIELLHYLDLETTWLNTLEERMKSTEVLPEKTDAVNEALESLESVLRHPADNRTQIRELGQTLIDGGILDDIISEKLEAFNSRYEDLSHLAESKQISLEKQLQVLRETDQMLQVLQESLGELDKQLTTYLTDRIDAFQVPQEAQKIQAEISAHELTLEELRRNMRSQPLTSPESRTARGGSQMDVLQRKLREVSTKFQLFQKPANFEQRMLDCKRVLDGVKAELHVLDVKDVDPDVIQTHLDKCMKLYKTLSEVKLEVETVIKTGRHIVQKQQTDNPKGMDEQLTSLKVLYNDLGAQVTEGKQDLERASQLARKMKKEAASLSEWLSATETELVQKSTSEGLLGDLDTEISWAKNVLKDLEKRKADLNTITESSAALQNLIEGSEPILEERLCVLNAGWSRVRTWTEDWCNTLMNHQNQLEIFDGNVAHISTWLYQAEALLDEIEKKPTSKQEEIVKRLVSELDDANLQVENVRDQALILMNARGSSSRELVEPKLAELNRNFEKVSQHIKSAKLLIAQEPLYQCLVTTETFETGVPFSDLEKLENDIENMLKFVEKHLESSDEDEKMDEESAQIEEVLQRGEEMLHQPMEDNKKEKIRLQLLLLHTRYNKIKAIPIQQRKMGQLASGIRSSLLPTDYLVEINKILLCMDDVELSLNVPELNTAIYEDFSFQEDSLKNIKDQLDKLGEQIAVIHEKQPDVILEASGPEAIQIRDTLTQLNAKWDRINRMYSDRKGCFDRAMEEWRQFHCDLNDLTQWITEAEELLVDTCAPGGSLDLEKARIHQQELEVGISSHQPSFAALNRTGDGIVQKLSQADGSFLKEKLAGLNQRWDAIVAEVKDRQPRLKGESKQVMKYRHQLDEIICWLTKAEHAMQKRSTTELGENLQELRDLTQEMEVHAEKLKWLNRTELEMLSDKSLSLPERDKISESLRTVNMTWNKICREVPTTLKECIQEPSSVSQTRIAAHPNVQKVVLVSSASDIPVQSHRTSEISIPADLDKTITELADWLVLIDQMLKSNIVTVGDVEEINKTVSRMKITKADLEQRHPQLDYVFTLAQNLKNKASSSDMRTAITEKLERVKNQWDGTQHGVELRQQQLEDMIIDSLQWDDHREETEELMRKYEARLYILQQARRDPLTKQISDNQILLQELGPGDGIVMAFDNVLQKLLEEYGSDDTRNVKETTEYLKTSWINLKQSIADRQNALEAEWRTVQASRRDLENFLKWIQEAETTVNVLVDASHRENALQDSILARELKQQMQDIQAEIDAHNDIFKSIDGNRQKMVKALGNSEEATMLQHRLDDMNQRWNDLKAKSASIRAHLEASAEKWNRLLMSLEELIKWLNMKDEELKKQMPIGGDVPALQLQYDHCKALRRELKEKEYSVLNAVDQARVFLADQPIEAPEEPRRNLQSKTELTPEERAQKIAKAMRKQSSEVKEKWESLNAVTSNWQKQVDKALEKLRDLQGAMDDLDADMKEAESVRNGWKPVGDLLIDSLQDHIEKIMAFREEIAPINFKVKTVNDLSSQLSPLDLHPSLKMSRQLDDLNMRWKLLQVSVDDRLKQLQEAHRDFGPSSQHFLSTSVQLPWQRSISHNKVPYYINHQTQTTCWDHPKMTELFQSLADLNNVRFSAYRTAIKIRRLQKALCLDLLELSTTNEIFKQHKLNQNDQLLSVPDVINCLTTTYDGLEQMHKDLVNVPLCVDMCLNWLLNVYDTGRTGKIRVQSLKIGLMSLSKGLLEEKYRYLFKEVAGPTEMCDQRQLGLLLHDAIQIPRQLGEVAAFGGSNIEPSVRSCFQQNNNKPEISVKEFIDWMHLEPQSMVWLPVLHRVAAAETAKHQAKCNICKECPIVGFRYRSLKHFNYDVCQSCFFSGRTAKGHKLHYPMVEYCIPTTSGEDVRDFTKVLKNKFRSKKYFAKHPRLGYLPVQTVLEGDNLETPITLISMWPEHYDPSQSPQLFHDDTHSRIEQYATRLAQMERTNGSFLTDSSSTTGSVEDEHALIQQYCQTLGGESPVSQPQSPAQILKSVEREERGELERIIADLEEEQRNLQVEYEQLKDQHLRRGLPVGSPPESIISPHHTSEDSELIAEAKLLRQHKGRLEARMQILEDHNKQLESQLHRLRQLLEQPESDSRINGVSPWASPQHSALSYSLDPDASGPQFHQAAGEDLLAPPHDTSTDLTEVMEQIHSTFPSCCPNVPSRPQAM

SEQ ID NO: 302 - protein, 2071 aa, Homo sapiens
MELAHSLLLNEEALAQITEAKRPVFIFEWLRFLDKVLVAANKTDVKEKQKKLVEQLTGLISSSPGPPTRKLLAKNLAALYSIGDTFTVFQTLDKCNDIIRNKDDTAAYLPTKLAAVACVGAFYEKMGRMLGSAFPETVNNLLKSLKSAESQGRSEILMSLQKVLSGLGGAAASSHRDIYKNARSLLTDRSMAVRCAVAKCLLELQNEAVFMWTAELENIATLCFKALENSNYGVRVAVSKLLGTVMATALMPKQATVMRQNVKRATFDEVLELMATGFLRGGSGFLKSGGEMLKVGGSVNREVRVGVTQAYVVFVTTLGGQWLERSFATFLSHVLDLVSHPRATQTHVEAVYSRRCVSFILRATVGSLLGEKAQIAAAKEICQAIGKQMKAVEAVVNDTSGENKSGAADIAASQHVMVCALQELGSLVQSLNATASPLIQEASIGLLEIVTSVLLHPSMAARLAAAWCLRCVAVALPFQLTPFLDRCAERLNNLKTSPEAVSGYSFAMAALLGGVHQCPLGIPHAKGKMVVSIAEDLLRTAAQNSRLSLQRTQAGWLLLGALMTLGPSVVRYHLPKMLLLWRNVFPRSLKELEAEKARGDSFTWQVTLEGRAGALCAMRSFVAHCPELLTEDVIRKLMTPIECAMTMMSHIPSVMKAHGAHLKASAAMVRLRLYDILALLPPKTYEGSFNALLRELVAEFTLTDNSANTTTSLLRSLCHYDDSVLLGSWLQETDHKSIEDQLQPNSASGSGALEHDPSSIYLRIPAGEAVPGPLPLGVSVIDASVALFGVVFPHVSYKHRLQMLDHFAECVKQAKGVRQQAVQLNIFTAVLSALKGLAENKSTLGPEEVRKSALTLVMGPLDNPNPILRCAAGEALGRMAQVVGEATFIARMAQYSFDKLKSARDVVSRTGHSLALGCLHRYVGGIGSGQHLKTSVSILLALAQDGTSPEVQTWSLHSLALIVDSSGPMYRGYVEPTLSLVLTLLLTVPPSHTEVHQCLGRCLGAIITTVGPELQGNGATTSTIRSSCLVGCAITQDHSDSLVQAAAISCLQQLHMFAPRHVNLSSLVPSLCVHLCSSHLLLRRAAVACLRQLAQREAAEVCEYAMSLAKNTGDKESSSANVSPFAPGVSSRTDIHCRHQGVNITETGLEGLLFGMLDRETDRKLCSDIHDTLGHMLSSLAVEKLSHWLMLCKDVLAASSDMSTATLLSSGKDEEAEKKDEMDDDTMFTTLGEEDKSKPFVAPRWATRVFAADCLCRIINLCENADQAHFDLALARSAKLRNPTNDLLVLHLSDLIRMAFMAATDHSNQLRMAGLQALEDIIKKFASVPEPEFPGHVILEQYQANVGAALRPAFSQDTPSDIIAKACQVCSTWIGSGVVSDLNDLRRVHNLLVSSLDKVQAGKGSSSQLYRESATTMEKLAVLKAWAEVYVVAMNIKKEAESKPKRAIKNTDDDDDDCGTIDELPPDSLITLVQPELPTLSRLWLAALKDYALLTLPAEFSSQLPPDGGAFYTPETIDTARLHYRNSWAPILHAVALWLNSTGFTCSESTEAAAISGLQKRSTSVNLNQASGAVGSAKSLPEINKDRMHLILGVSIQFLCSPRPEEPIEHVTACLQALHTLLDSPYARVHIAEDQLIGVELLSVLHRLLLTWNPSSVQLLVTGVVQQIVRAAQDYLQEKRNTLNEDDMEKEACTVLGEGGDSGGLIPGKSLVFATMELLMFILVRHMPHLSTKVSDSPSHIATKTRLSEESARLVAATVTILSDLPSLCSPAGCMTILPTILFLIARILKDTAIKSADNQVPPPVSAALQGIKSIVTLSMAKTEAGVQKQWTALIRSTLACILEYSQPEDSVPTPDEVSMLTAIALFLWSASNEIIGVQSLQNGCMNRFKNALNSCDPWVQAKCYQLLLSVFQHSNRALSTPYIHSLAPIVVEKLKAVERNRPASNIELLAVQEGIKVLETLVALGEEQNRVQLLALLVPTLISYLLDENSFASASSASKDLHEFALQNLMHIGPLYPHAFKTVMGAAPELKVRLETAVRASQASKAKAAARQPAPAIHSAPTIKLKTSFF

SEQ ID NO: 303 - protein, 3013 aa, Homo sapiens
MASQQDSGFFEISIKYLLKSWSNTSPVGNGYIKPPVPPASGTHREKGPPTMLPINVDPDSKPGEYVLKSLFVNFTTQAERKIRIIMAEPLEKPLTKSLQRGEDPQFDQVISSMSSLSEYCLPSILRTLFDWYKRQNGIEDESHEYRPRTSNKSKSDEQQRDYLMERRDLAIDFIFSLVLIEVLKQIPLHPVIDSLIHDVINLAFKHFKYKEGYLGPNTGNMHIVADLYAEVIGVLAQAKFPAVKKKFMAELKELRHKEQNPYVVQSIISLIMGMKFFRIKMYPVEDFEASLQFMQECAHYFLEVKDKDIKHALAGLFVEILVPVAAAVKNEVNVPCLRNFVESLYDTTLELSSRKKHSLALYPLVTCLLCVSQKQLFLNRWHIFLNNCLSNLKNKDPKMARVALESLYRLLWVYMIRIKCESNTATQSRLITIITTLFPKGSRGVVPRDMPLNIFVKIIQFIAQERLDFAMKEIIFDFLCVGKPAKAFSLNPERMNIGLRAFLVIADSLQQKDGEPPMPVTGAVLPSGNTLRVKKTYLSKTLTEEEAKMIGMSLYYSQVRKAVDNILRHLDKEVGRCMMLTNVQMLNKEPEDMITGERKPKIDLFRTCVAAIPRLLPDGMSKLELIDLLARLSIHMDDELRHIAQNSLQGLLVDFSDWREDVLFGFTNFLLREVNDMHHTLLDSSLKLLLQLLTQWKLVIQTQGKVYEQANKIRNSELIANGSSHRIQSERGPHCSVLHAVEGFALVLLCSFQVATRKLSVLILKEIRALFIALGQPEDDDRPMIDVMDQLSSSILESFIHVAVSDSATLPLTHNVDLQWLVEWNAVLVNSHYDVKSPSHVWIFAQSVKDPWVLCLFSFLRQENLPKHCPTALSYAWPYAFTRLQSVMPLVDPNSPINAKKTSTAGSGDNYVTLWRNYLILCFGVAKPSIMSPGHLRASTPEIMATTPDGTVSYDNKAIGTPSVGVLLKQLVPLMRLESIEITESLVLGFGRTNSLVFRELVEELHPLMKEALERRPENKKRRERRDLLRLQLLRIFELLADAGVISDSTNGALERDTLALGALFLEYVDLTRMLLEAENDKEVEILKDIRAHFSAMVANLIQCVPVHHRRFLFPQQSLRHHLFILFSQWAGPFSIMFTPLDRYSDRNHQITRYQYCALKAMSAVLCCGPVFDNVGLSPDGYLYKWLDNILACQDLRVHQLGCEVVVLLLELNPDQINLFNWAIDRCYTGSYQLASGCFKAIATVCGSRNYPFDIVTLLNLVLFKASDTNREIYEISMQLMQILEAKLFVYSKKVAEQRPGSILYGTHGPLPPLYSVSLALLSCELARMYPELTLPLFSEVSQRFPTTHPNGRQIMLTYLLPWLHNIELVDSRLLLPGSSPSSPEDEVKDREGDVTASHGLRGNGWGSPEATSLVLNNLMYMTAKYGDEVPGPEMENAWNALANNEKWSNNLRITLQFLISLCGVSSDTVLLPYIKKVAIYLCRNNTIQTMEELLFELQQTEPVNPIVQHCDNPPFYRFTASSKASAAASGTTSSSNTVVAGQENFPDAEENKILKESDERFSNVIRAHTRLESRYSNSSGGSYDEDKNDPISPYTGWLLTITETKQPQPLPMPCTGGCWAPLVDYLPETITPRGPLHRCNIAVIFMTEMVVDHSVREDWALHLPLLLHAVFLGLDHYRPEVFEHSKKLLLHLLIALSCNSNFHSIASVLLQTREMGEAKTLTVQPAYQPEYLYTGGFDFLREDQSSPVPDSGLSSSSTSSSISLGGSSGNLPQMTQEVEDVDTAAETDEKANKLIEFLTTRAFGPLWCHEDITPKNQNSKSAEQLTNFLRHVVSVFKDSKSGFHLEHQLSEVALQTALASSSRHYAGRSFQIFRALKQPLSAHALSDLLSRLVEVIGEHGDEIQGYVMEALLTLEAAVDNLSDCLKNSDLLTVLSRSSSPDLSSSSKLTASRKSTGQLNMNPGTTSGNTATAERSRHQRSFSVPKKFGVIDRSSDPPRSATLDRIQACTQQGLSSKTRSSSSLKDSLTDPSHINHPTNLLATIFWVTVALMESDFEFEYLMALRLLSRLLAHMPLDKAENREKLEKLQAQLKWADFSGLQQLLLKGFTSLTTTDLTLQLFSLLTPVSKISMVDASHAIGFPLNVLCLLPQLIQHFENPNQFCKDIAERIAQVCLEEKNPKLSNLAHVMTLYKTHSYTRDCATWVNVVCRYLHEAYADITLNMVTYLAELLEKGLPSVQQPLLQVIYSLLSYMDLSVVPVKQFNVEVLKTIEKYVQSVHWREALNILKLVVSRSASLVLPSYQHSDLSKIEIHRVWTSASKELPGKTLDFHFDISETPIIGRRYDELQNSSGRDGKPRAMAVTRSTSSTSSGSNSNVLVPVSWKRPQYSQKRTKEKLVHVLSLCGQEVGLSKNPSVIFSSCGDLDLLEHQTSLVSSEDGAREQENMDDTNSEQQFRVFRDFDFLDVELEDGEGESMDNFNWGVRRRSLDSLDKCDMQILEERQLSGSTPSLNKMHHEDSDESSEEEDLTASQILEHSDLIMTLSPSEETNPMELLTTACDSTPAEPHSFNTRMSSFDASLPDMNNLQISEGSKAEAVREEEDTTVHEDDLSSSINELPAAFECSDSFSLDMTEGEEKGNRALDQFTLASFGEGDRGVSPPPSPFFSAILAAFQPAACDDAEEAWRSHINQLMCDSDGSCAVYTFHVFSSLFKNIQKRFCFLTCDAASYLGDNLRGIGSKFVSSSQMLTSCSECPTLFVDAETLLSCGLLDKLKFSVLELQEYLDTYNNRKEATLSWLANCKATFAGGSRDGVITCQPGDSEEKQLELCQRLYKLHFQLLLLFQSYCKLIGQVHEVSSMPELLNMSRELSDLKKHLKEASAVIAADPLYSDGAWSEPTFTSTEAAIQSMLECLKNNELGKALRQIRECRSLWPNDIFGSSSDDEVQTLLNIYFRHQTLGQTGTYALVGSNQSLTEICTKLMELNMEIRDMIRRAQSYRVLTTFLPDSSVSGTSL

SEQ ID NO: 304 - protein, 2581 aa, Homo sapiens
MADPIMDLFDDPNLFGLDSLTDDSFNQVTQDPIEEALGLPSSLDSLDQMNQDGGGGDVGNSSASELVPPPEETAPTELSKESTAPAPESITLHDYTTQPASQEQPAQPVLQTSTPTSGLLQVSKSQEILSQGNPFMGVSATAVSSSSAGGQPPQSAPKIVILKAPPSSSVTGAHVAQIQAQGITSTAQPLVAGTANGGKVTFTKVLTGTPLRPGVSIVSGNTVLAAKVPGNQAAVQRIVQPSRPVKQLVLQPVKGSAPAGNPGATGPPLKPAVTLTSTPTQGESKRITLVLQQPQSGGPQGHRHVVLGSLPGKIVLQGNQLAALTQAKNAQGQPAKVVTIQLQVQQPQQKIQIVPQPPSSQPQPQQPPSTQPVTLSSVQQAQIMGPGQSPGQRLSVPVKVVLQPQAGSSQGASSGLSVVKVLSASEVAALSSPASSAPHSGGKTGMEENRRLEHQKKQEKANRIVAEAIARARARGEQNIPRVLNEDELPSVRPEEEGEKKRRKKSAGERLKEEKPKKSKTSGASKTKGKSKLNTITPVVGKKRKRNTSSDNSDVEVMPAQSPREDEESSIQKRRSNRQVKRKKYTEDLDIKITDDEEEEEVDVTGPIKPEPILPEPVQEPDGETLPSMQFFVENPSEEDAAIVDKVLSMRIVKKELPSGQYTEAEEFFVKYKNYSYLHCEWATISQLEKDKRIHQKLKRFKTKMAQMRHFFHEDEEPFNPDYVEVDRILDESHSIDKDNGEPVIYYLVKWCSLPYEDSTWELKEDVDEGKIREFKRIQSRHPELKRVNRPQASAWKKLELSHEYKNRNQLREYQLEGVNWLLFNWYNRQNCILADEMGLGKTIQSIAFLQEVYNVGIHGPFLVIAPLSTITNWEREFNTWTEMNTIVYHGSLASRQMIQQYEMYCKDSRGRLIPGAYKFDALITTFEMILSDCPELREIEWRCVIIDEAHRLKNRNCKLLDSLKHMDLEHKVLLTGTPLQNTVEELFSLLHFLEPSQFPSESEFLKDFGDLKTEEQVQKLQAILKPMMLRRLKEDVEKNLAPKQETIIEVELTNIQKKYYRAILEKNFSFLSKGAGHTNMPNLLNTMMELRKCCNHPYLINGAEEKILTEFREACHIIPHDFHLQAMVRSAGKLVLIDKLLPKLKAGGHKVLIFSQMVRCLDILEDYLIQRRYLYERIDGRVRGNLRQAAIDRFSKPDSDRFVFLLCTRAGGLGINLTAADTCIIFDSDWNPQNDLQAQARCHRIGQSKAVKVYRLITRNSYEREMFDKASLKLGLDKAVLQSMSGRDGNITGIQQFSKKEIEDLLRKGAYAAIMEEDDEGSKFCEEDIDQILLRRTTTITIESEGKGSTFAKASFVASENRTDISLDDPNFWQKWAKKADLDMDLLNSKNNLVIDTPRVRKQTRHFSTLKDDDLVEFSDLESEDDERPRSRRHDRHHAYGRTDCFRVEKHLLVYGWGRWRDILSHGRFKRRMTERDVETICRAILVYCLLHYRGDENIKGFIWDLISPAENGKTKELQNHSGLSIPVPRGRKGKKVKSQSTFDIHKADWIRKYNPDTLFQDESYKKHLKHQCNKVLLRVRMLYYLRQEVIGDQAEKVLGGAIASEIDIWFPVVDQLEVPTTWWDSEADKSLLIGVFKHGYEKYNTMRADPALCFLEKAGRPDDKAIAAEHRVLDNFSDIVEGVDFDKDCEDPEYKPLQGPPKDQDDEGDPLMMMDEEISVIDGDEAQVTQQPGHLFWPPGSALTARLRRLVTAYQRSYKREQMKIEAAERGDRRRRRCEAAFKLKEIARREKQQRWTRREQTDFYRVVSTFGVEYDPDTMQFHWDRFRTFARLDKKTDESLTKYFHGFVAMCRQVCRLPPAAGDEPPDPNLFIEPITEERASRTLYRIELLRRLREQVLCHPLLEDRLALCQPPGPELPKWWEPVRHDGELLRGAARHGVSQTDCNIMQDPDFSFLAARMNYMQNHQAGAPAPSLSRCSTPLLHQQYTSRTASPLPLRPDAPVEKSPEETATQVPSLESLTLKLEHEVVARSRPTPQDYEMRVSPSDTTPLVSRSVPPVKLEDEDDSDSELDLSKLSPSSSSSSSSSSSSSSTDESEDEKEEKLTDQSRSKLYDEESLLSLTMSQDGFPNEDGEQMTPELLLLQERQRASEWPKDRVLINRIDLVCQAVLSGKWPSSRRSQEMVTGGILGPGNHLLDSPSLTPGEYGDSPVPTPRSSSAASMAEEEASAVSTAAAQFTKLRRGMDEKEFTVQIKDEEGLKLTFQKHKLMANGVMGDGHPLFHKKKGNRKKLVELEVECMEEPNHLDVDLETRIPVINKVDGTLLVGEDAPRRAELEMWLQGHPEFAVDPRFLAYMEDRRKQKWQRCKKNNKAELNCLGMEPVQTANSRNGKKGHHTETVFNRVLPGPIAPESSKKRARRMRPDLSKMMALMQGGSTGSLSLHNTFQHSSSGLQSVSSLGHSSATSASLPFMPFVMGGAPSSPHVDSSTMLHHHHHHPHPHHHHHHHPGLRAPGYPSSPVTTASGTTLRLPPLQPEEDDDEDEEDDDDLSQGYDSSERDFSLIDDPMMPANSDSSEDADD

SEQ ID NO: 305 - protein, 2572 aa, Homo sapiens
MATLNSASTTGTTPSPGHNAPSLPSDTFSSSTPSDPVTKDPPAASSTSENMRSSEPGGQLLESGCGLVPPKEIGEPQEGPDCGHFPPNDPGVEKDKEQEEEEEGLPPMDLSNHLFFTAGGEAYLVAKLSLPGGSELLLPKGFPWGEAGIKEEPSLPFLAYPPPSHLTALHIQHGFDPIQGFSSSDQILSHDTSAPSPAACEERHGAFWSYQLAPNPPGDPKDGPMGNSGGNHVAVFWLCLLCRLGFSKPQAFMDHTQSHGVKLTPAQYQGLSGSPAVLQEGDEGCKALISFLEPKLPARPSSDIPLDNSSTVNMEANVAQTEDGPPEAEVQALILLDEEVMALSPPSPPTATWDPSPTQAKESPVAAGEAGPDWFPEGQEEDGGLCPPLNQSSPTSKEGGTLPAPVGSPEDPSDPPQPYRLADDYTPAPAAFQGLSLSSHMSLLHSRNSCKTLKCPKCNWHYKYQQTLDVHMREKHPESNSHCSYCSAGGAHPRLARGESYNCGYKPYRCDVCNYSTTTKGNLSIHMQSDKHLANLQGFQAGPGGQGSPPEASLPPSAGDKEPKTKSSWQCKVCSYETNISRNLRIHMTSEKHMQNVLMLHQGLPLGLPPGLMGPGPPPPPGATPTSPPELFQYFGPQALGQPQTPLAGPGLRPDKPLEAQLLLNGFHHVGAPARKFPTSAPGSLSPDAHLPPSQLLGSSSDSLPTSPPPDDSLSLKVFRCLVCQAFSTDSLELLLYHCSIGRSLPEAEWKEVAGDTHRCKLCCYGTQLKANFQLHLKTDKHAQKYQLAAHLREGGGAMGTPSPASLGDGAPYGSVSPLHLRCNICDFESNSKEKMQLHARGAAHEENSQIYKFLLDMEGAEAGAELGLYHCLLCAWETPSRLAVLQHLRTPAHRDAQAQRRLQLLQNGPTTEEGLAALQSILSFSHGQLRTPGKAPVTPLAEPPTPEKDAQNKTEQLASEETENKTGPSRDSANQTTVYCCPYCSFLSPESSQVRAHTLSQHAVQPKYRCPLCQEQLVGRPALHFHLSHLHNVVPECVEKLLLVATTVEMTFTTKVLSAPTLSPLDNGQEPPTHGPEPTPSRDQAAEGPNLTPEASPDPLPEPPLASVEVPDKPSGSPGQPPSPAPSPVPEPDAQAEDVAPPPTMAEEEEGTTGELRSAEPAPADSRHPLTYRKTTNFALDKFLDPARPYKCTVCKESFTQKNILLVHYNSVSHLHKMKKAAIDPSAPARGEAGAPPTTTAATDKPFKCTVCRVSYNQSSTLEIHMRSVLHQTRSRGTKTDSKIEGPERSQEEPKEGETEGEVGTEKKGPDTSGFISGLPFLSPPPPPLDLHRFPAPLFTPPVLPPFPLVPESLLKLQQQQLLLPFYLHDLKVGPKLTLAGPAPVLSLPAATPPPPPQPPKAELAEREWERPPMAKEGNEAGPSSPPDPLPNEAARTAAKALLENFGFELVIQYNEGKQAVPPPPTPPPPEALGGGDKLACGACGKLFSNMLILKTHEEHVHRRFLPFEALSRYAAQFRKSYDSLYPPLAEPPKPPDGSLDSPVPHLGPPFLVPEPEAGGTRAPEERSRAGGHWPIEEEESSRGNLPPLVPAGRRFSRTKFTEFQTQALQSFFETSAYPKDGEVERLASLLGLASRVVVVWFQNARQKARKNACEGGSMPTGGGTGGASGCRRCHATFSCVFELVRHLKKCYDDQTLEEEEEEAERGEEEEEVEEEEVEEEQGLEPPAGPEGPLPEPPDGEELSQAEATKAGGKEPEEKATPSPSPAHTCDQCAISFSSQDLLTSHRRLHFLPSLQPSAPPQLLDLPLLVFGERNPLVAATSPMPGPPLKRKHEDGSLSPTGSEAGGGGEGEPPRDKRLRTTILPEQLEILYRWYMQDSNPTRKMLDCISEEVGLKKRVVQVWFQNTRARERKGQFRSTPGGVPSPAVKPPATATPASLPKFNLLLGKVDDGTGREAPKREAPAFPYPTATLASGPQPFLPPGKEATTPTPEPPLPLLPPPPPSEEEGPEEPPKASPESEACSLSAGDLSDSSASSLAEPESPGAGGTSGGPGGGTGVPDGMGQRRYRTQMSSLQLKIMKACYEAYRTPTMQECEVLGEEIGLPKRVIQVWFQNARAKEKKAKLQGTAAGSTGGSSEGLLAAQRTDCPYCDVKYDFYVSCRGHLFSRQHLAKLKEAVRAQLKSESKCYDLAPAPEAPPALKAPPATTPASMPLGAAPTLPRLAPVLLSGPALAQPPLGNLAPFNSGPAASSGLLGLATSVLPTTTVVQTAGPGRPLPQRPMPDQTNTSTAGTTDPVPGPPTEPLGDKVSSERKPVAGPTSSSNDALKNLKALKTTVPALLGGQFLPFPLPPAGGTAPPAVFGPQLQGAYFQQLYGMKKGLFPMNPMIPQTLIGLLPNALLQPPPQPPEPTATAPPKPPELPAPGEGEAGEVDELLTGSTGISTVDVTHRYLCRQCKMAFDGEAPATAHQRSFCFFGRGSGGSMPPPLRVPICTYHCLACEVLLSGREALASHLRSSAHRRKAAPPQGGPPISITNAATAASAAVAFAKEEARLPHTDSNPKTTTTSTLLAL

SEQ ID NO: 306 - protein, 2803 aa, Homo sapiens
MDGVAEFSEYVSETVDVPSPFDLLEPPTSGGFLKLSKPCCYIFPGGRGDSALFAVNGFNILVDGGSDRKSCFWKLVRHLDRIDSVLLTHIGADNLPGINGLLQRKVAELEEEQSQGSSSYSDWVKNLISPELGVVFFNVPEKLRLPDASRKAKRSIEEACLTLQHLNRLGIQAEPLYRVVSNTIEPLTLFHKMGVGRLDMYVLNPVKDSKEMQFLMQKWAGNSKAKTGIVLPNGKEAEISVPYLTSITALVVWLPANPTEKIVRVLFPGNAPQNKILEGLEKLRHLDFLRYPVATQKDLASGAVPTNLKPSKIKQRADSKESLKATTKTAVSKLAKREEVVEEGAKEARSELAKELAKTEKKAKESSEKPPEKPAKPERVKTESSEALKAEKRKLIKDKVGKKHLKEKISKLEEKKDKEKKEIKKERKELKKDEGRKEEKKDAKKEEKRKDTKPELKKISKPDLKPFTPEVRKTLYKAKVPGRVKIDRSRAIRGEKELSSEPQTPPAQKGTVPLPTISGHRELVLSSPEDLTQDFEEMKREERALLAEQRDTGLGDKPFPLDTAEEGPPSTAIQGTPPSVPGLGQEEHVMKEKELVPEVPEEQGSKDRGLDSGAETEEEKDTWEEKKQREAERLPDRTEAREESEPEVKEDVIEKAELEEMEEVHPSDEEEEDATKAEGFYQKHMQEPLKVTPRSREAFGGRELGLQGKAPEKETSLFLSSLTTPAGATEHVSYIQDETIPGYSETEQTISDEEIHDEPEERPAPPRFHTSTYDLPGPEGAGPFEASQPADSAVPATSGKVYGTPETELTYPTNIVAAPLAEEEHVSSATSITECDKLSSFATSVAEDQSVASLTAPQTEETGKSSLLLDTVTSIPSSRTEATQGLDYVPSAGTISPTSSLEEDKGFKSPPCEDFSVTGESEKRGEIIGKGLSGERAVEEEEEETANVEMSEKLCSQYGTPVFSAPGHALHPGEPALGEAEERCLSPDDSTVKMASPPPSGPPSATHTPFHQSPVEEKSEPQDFQEADSWGDTKRTPGVGKEDAAEETVKPGPEEGTLEKEEKVPPPRSPQAQEAPVNIDEGLTGCTIQLLPAQDKAIVFEIMEAGEPTGPILGAEALPGGLRTLPQEPGKPQKDEVLRYPDRSLSPEDAESLSVLSVPSPDTANQEPTPKSPCGLTEQYLHKDRWPEVSPEDTQSLSLSEESPSKETSLDVSSKQLSPESLGTLQFGELNLGKEEMGHLMQAEDTSHHTAPMSVPEPHAATASPPTDGTTRYSAQTDITDDSLDRKSPASSFSHSTPSGNGKYLPGAITSPDEHILTPDSSFSKSPESLPGPALEDIAIKWEDKVPGLKDRTSEQKKEPEPKDEVLQQKDKTLEHKEVVEPKDTAIYQKDEALHVKNEAVKQQDKALEQKGRDLEQKDTALEQKDKALEPKDKDLEEKDKALEQKDKIPEEKDKALEQKDTALEQKDKALEPKDKDLEQKDRVLEQKEKIPEEKDKALDQKVRSVEHKAPEDTVAEMKDRDLEQTDKAPEQKHQAQEQKDKVSEKKDQALEQKYWALGQKDEALEQNIQALEENHQTQEQESLVQEDKTRKPKMLEEKSPEKVKAMEEKLEALLEKTKALGLEESLVQEGRAREQEEKYWRGQDVVQEWQETSPTREEPAGEQKELAPAWEDTSPEQDNRYWRGREDVALEQDTYWRELSCERKVWFPHELDGQGARPHYTEERESTFLDEGPDDEQEVPLREHATRSPWASDFKDFQESSPQKGLEVERWLAESPVGLPPEEEDKLTRSPFEIISPPASPPEMVGQRVPSAPGQESPIPDPKLMPHMKNEPTTPSWLADIPPWVPKDRPLPPAPLSPAPGPPTPAPESHTPAPFSWGTAEYDSVVAAVQEGAAELEGGPYSPLGKDYRKAEGEREEEGRAEAPDKSSHSSKVPEASKSHATTEPEQTEPEQREPTPYPDERSFQYADIYEQMMLTGLGPACPTREPPLGAAGDWPPCLSTKEAAAGRNTSAEKELSSPISPKSLQSDTPTFSYAALAGPTVPPRPEPGPSMEPSLTPPAVPPRAPILSKGPSPPLNGNILSCSPDRRSPSPKESGRSHWDDSTSDSELEKGAREQPEKEAQSPSPPHPIPMGSPTLWPETEAHVSPPLDSHLGPARPSLDFPASAFGFSSLQPAPPQLPSPAEPRSAPCGSLAFSGDRALALAPGPPTRTRHDEYLEVTKAPSLDSSLPQLPSPSSPGAPLLSNLPRPASPALSEGSSSEATTPVISSVAERFSPSLEAAEQESGELDPGMEPAAHSLWDLTPLSPAPPASLDLALAPAPSLPGDMGDGILPCHLECSEAATEKPSPFQVPSEDCAANGPTETSPNPPGPAPAKAENEEAAACPAWERGAWPEGAERSSRPDTLLSPEQPVCPAGGSGGPPSSASPEVEAGPQGCATEPRPHRGELSPSFLNPPLPPSIDDRDLSTEEVRLVGRGGRRRVGGPGTTGGPCPVTDETPPTSASDSGSSQSDSDVPPETEECPSITAEAALDSDEDGDFLPVDKAGGVSGTHHPRPGHDPPPLPQPDPRPSPPRPDVCMADPEGLSSESGRVERLREKEKVQGRVGRRAPGKAKPASPARRLDLRGKRSPTPGKGPADRASRAPPRPRSTTSQVTPAEEKDGHSPMSKGLVNGLKAGPMALSSKGSSGAPVYVDLAYIPNHCSGKTADLDFFRRVRASYYVVSGNDPANGEPSRAVLDALLEGKAQWGENLQVTLIPTHDTEVTREWYQQTHEQQQQLNVLVLASSSTVVMQDESFPACKIEF

SEQ ID NO: 307 - protein, 2715 aa, Homo sapiens
MDLVITQELARAESQQDAASLKKAYELIKSANLGKSEFDPSESFSPDLFVLCAEQALKMRQPEVSEDCIQMYFKVKAPITQFLGRAHLCRAQMCAPKSAENLEEFENCVTEYMKAINFAKGEPRYYFLVYNASVLYWQMVRPFLKPGYRHHLIPSLSQIINVLSQTEEEDKEWRAELMLELLECYLQAGRKEEAARFCSTAAPFIKSHVPQKYRQIFSVMVRHELMDELQLKEEKKNSISLSVTFYINMLKAKAEQNDLPGDISVILRKAYRHLGHYNHQRFPSISEEKMLLLFELARFSLTLKCMEISSACLSDLKKMESKDPGKLIEMECLECESEALRLESKMKVYNRAAVEAQLDIIQRLDVALQRAVRLGDPRVIHVVCATQWNTCLPLLQHNLRHHLRKPLAGVADVLEKLDSLMTLLRCQVHMEMAQIEEDEDRLEPATEHLRKAARLDSLGLYRDRIQMASTRLRLCTTLYQAPERAEDKAIMAVEQAKKATPKDSVRKKRALLVNAGLALAPDAFQIVLDSENEAKVSTGKNRGRFTYLCAKAWHHTVSVDKAAGHLRRLGNENDKERIQIWAELAKVARKQGVWDVCRTASRFCLLYDNVKVKKLRLRRGKKKRGRDGSVQDTWSQPEVVLQRQVCPDLLRKFAEVGFIHAEATVHLLRSEGVELNDRAIPPEDLSQHPAGYVPEPPEVNAEWITYRTWIESLSRCAMNNWLRSAEIGQEIQEAWIVQNAVVYVLNHNHHLILAGRQKELVDALYHLLSIVKATGHSGDPVMLVTLCNTLARGLIISWIPVQAAEKSRKFMRPNAFHSPLDAGATSEIKTAVEVCEFALNLTNGSAPEETVPTGTRQQLIATWVKAKQLLQQQIGPRLGTEEQGTNEDVSSVTRVLVALEMYSCNGLGLMDFTVPSLAQLVKMASECNWSDPLVELQTLTRLTHFAHAARDHETTMACAHRALEMGIKYLKKFGPEESRLVAEMLCTATAIQGRSIMENLKGRKQLRLVAAKAFTESARFGGIAGSSALVMLAARHYWNAWLPLLSSAVYRKKAKGALKRLIGIINKTEARKQEKGKTLLLHQWPTADFQGGGTTEGYFLPGAEDDLALRAALYGLLFHSHADQDDWEGGLKVLDEAVQVLPRTAHRLLIFKHMVIVKAKLGQNFSMEIQKFKAESEDYLARMWHRLALNSPSVSGELACYNNAIQALQKPEMEWQKVEYLMEFGQWLHHRHFPLEDVVFHLRWAVEILLAMKPPGDVPEPQPTPDGEYVAVEMPPRSPVSEAEEAVSLEQLRSVRQLEALARVHILLALVLSPGAEGYEDCCLAAYAFFRHIWQVSLMTAGKSVLENRPLAATSSHLLLPKKEKENERSKEKEKERSKEKENERSKEKDKEKGKEEKVKEPKQSQSPAPIKQLEDLPMSIEEWASYSCPEEVLSVLKQDRSDSTVNPSSIQKPTYSLYFLDHLVKALQKMCLHELTVPVLQLGVLISDSVVGSKGLSDLYHLRLAHACSELKLREAAARHEEAVGQVCVSELEQASCRKEIALKKEKNKEPLLEESLPALNEQTLPVQPGEIKPLDAKDKILKMNGETGRDLDGTSFPHLWMLKAEVLLEMNLYQPARLLLSEAYLAFQELDEPCAEAQCLLLLAQLANKEKNYGQAKKMIAQAQHLGGSEEFWYNSTLTLAEALLSMEHSGREATVCHIFQKLINAFKILKKERPNRLPLLEFMITDLEARCLSLRVRVAQHSAVTEPTECSLLLKEMDDGLLEIERKFIDCGCKENCVDVKLERAKIKRLRAQNEKDEEQKTAYYLEAYGLAQGAVAEEEGRLHSIQGLYGLAQGAMAEEEGRLHSVQGLLSLQDLQNVNTPLMRKLARLKLGLVEMALDMLQFIWEEAHGQQSEQGSLEKLLADYLQNTSDYTSVGLQWFTLKRTLAHGALAQLGSLQPLSVGCVEIRARLLGLAGRALHLLAMQADPVHPTCYWEAGPSVGAKLSGLKSLELEVEEEGATKSSRDPPASRAAPEEHCRRGEDLKRRMVLAQQYLAQASEVLLQCLQVALGSGLLDVAAAASLEMVECVGTLDPATTCQFLALSQSCSASETMRDVLLAATANTSSSQLAALLQLQHQLRCQDRTTTSLGARVEQRLAAVSKAWQNLCVTEQHFNLLNEMPPTFWILFLHLSGDRSRLYGAAYEKPKFITAAKGKVQAVGGSCKVMRLAISPTAFSHLLACAQQFRKQTQAQVYSEDMALNIGSEPEGLQVEEKERPVQRLSSVLGPLEELLQPLFPLLSLSKARVQTPAVVADSGKSKGKDKERKTSTGQHSTVQPEVADKIVLVADRHLLELPLEGLSVFDEGTISSVSREFSLQMLWNRLHKEETEGGVKKEGRSRDPKKRSLAKKGRKGSIPRTIPPDCIIVDSDNFKFVVDPYEEAQGPEMLTPVSITQDILERFQDTFTSRWAGHLGSKHFPSQAQWEQALGSCSGFFFYGMESFLSHILVERLVAMNLQECQVAVLLDLARSYQSLKRHMESVEHRRSVGRWEANWRNSASPSEDEWRRGGEPRRGFSDLEGQAAAAPKLRAPSHHAQLGPVWAAAPSHRVVQAWTCLPSAAGAPALASALGSAPLPTHPHLPAPIPSSQLALPFLGLSPALGAASARDPPPATSRKAAAWTSSSACLCAPWGLRRGWSCVSSRGQDKGGLPLAALVLSCLDQKTIQTVSLFLI

SEQ ID NO: 308 - protein, 4544 aa, Homo sapiens
MLTPPLLLLLPLLSALVAAAIDAPKTCSPKQFACRDQITCISKGWRCDGERDCPDGSDEAPEICPQSKAQRCQPNEHNCLGTELCVPMSRLCNGVQDCMDGSDEGPHCRELQGNCSRLGCQHHCVPTLDGPTCYCNSSFQLQADGKTCKDFDECSVYGTCSQLCTNTDGSFICGCVEGYLLQPDNRSCKAKNEPVDRPPVLLIANSQNILATYLSGAQVSTITPTSTRQTTAMDFSYANETVCWVHVGDSAAQTQLKCARMPGLKGFVDEHTINISLSLHHVEQMAIDWLTGNFYFVDDIDDRIFVCNRNGDTCVTLLDLELYNPKGIALDPAMGKVFFTDYGQIPKVERCDMDGQNRTKLVDSKIVFPHGITLDLVSRLVYWADAYLDYIEVVDYEGKGRQTIIQGILIEHLYGLTVFENYLYATNSDNANAQQKTSVIRVNRFNSTEYQVVTRVDKGGALHIYHQRRQPRVRSHACENDQYGKPGGCSDICLLANSHKARTCRCRSGFSLGSDGKSCKKPEHELFLVYGKGRPGIIRGMDMGAKVPDEHMIPIENLMNPRALDFHAETGFIYFADTTSYLIGRQKIDGTERETILKDGIHNVEGVAVDWMGDNLYWTDDGPKKTISVARLEKAAQTRKTLIEGKMTHPRAIVVDPLNGWMYWTDWEEDPKDSRRGRLERAWMDGSHRDIFVTSKTVLWPNGLSLDIPAGRLYWVDAFYDRIETILLNGTDRKIVYEGPELNHAFGLCHHGNYLFWTEYRSGSVYRLERGVGGAPPTVTLLRSERPPIFEIRMYDAQQQQVGTNKCRVNNGGCSSLCLATPGSRQCACAEDQVLDADGVTCLANPSYVPPPQCQPGEFACANSRCIQERWKCDGDNDCLDNSDEAPALCHQHTCPSDRFKCENNRCIPNRWLCDGDNDCGNSEDESNATCSARTCPPNQFSCASGRCIPISWTCDLDDDCGDRSDESASCAYPTCFPLTQFTCNNGRCININWRCDNDNDCGDNSDEAGCSHSCSSTQFKCNSGRCIPEHWTCDGDNDCGDYSDETHANCTNQATRPPGGCHTDEFQCRLDGLCIPLRWRCDGDTDCMDSSDEKSCEGVTHVCDPSVKFGCKDSARCISKAWVCDGDNDCEDNSDEENCESLACRPPSHPCANNTSVCLPPDKLCDGNDDCGDGSDEGELCDQCSLNNGGCSHNCSVAPGEGIVCSCPLGMELGPDNHTCQIQSYCAKHLKCSQKCDQNKFSVKCSCYEGWVLEPDGESCRSLDPFKPFIIFSNRHEIRRIDLHKGDYSVLVPGLRNTIALDFHLSQSALYWTDVVEDKIYRGKLLDNGALTSFEVVIQYGLATPEGLAVDWIAGNIYWVESNLDQIEVAKLDGTLRTTLLAGDIEHPRAIALDPRDGILFWTDWDASLPRIEAASMSGAGRRTVHRETGSGGWPNGLTVDYLEKRILWIDARSDAIYSARYDGSGHMEVLRGHEFLSHPFAVTLYGGEVYWTDWRTNTLAKANKWTGHNVTVVQRTNTQPFDLQVYHPSRQPMAPNPCEANGGQGPCSHLCLINYNRTVSCACPHLMKLHKDNTTCYEFKKFLLYARQMEIRGVDLDAPYYNYIISFTVPDIDNVTVLDYDAREQRVYWSDVRTQAIKRAFINGTGVETVVSADLPNAHGLAVDWVSRNLFWTSYDTNKKQINVARLDGSFKNAVVQGLEQPHGLVVHPLRGKLYWTDGDNISMANMDGSNRTLLFSGQKGPVGLAIDFPESKLYWISSGNHTINRCNLDGSGLEVIDAMRSQLGKATALAIMGDKLWWADQVSEKMGTCSKADGSGSVVLRNSTTLVMHMKVYDESIQLDHKGTNPCSVNNGDCSQLCLPTSETTRSCMCTAGYSLRSGQQACEGVGSFLLYSVHEGIRGIPLDPNDKSDALVPVSGTSLAVGIDFHAENDTIYWVDMGLSTISRAKRDQTWREDVVTNGIGRVEGIAVDWIAGNIYWTDQGFDVIEVARLNGSFRYVVISQGLDKPRAITVHPEKGYLFWTEWGQYPRIERSRLDGTERVVLVNVSISWPNGISVDYQDGKLYWCDARTDKIERIDLETGENREVVLSSNNMDMFSVSVFEDFIYWSDRTHANGSIKRGSKDNATDSVPLRTGIGVQLKDIKVFNRDRQKGTNVCAVANGGCQQLCLYRGRGQRACACAHGMLAEDGASCREYAGYLLYSERTILKSIHLSDERNLNAPVQPFEDPEHMKNVIALAFDYRAGTSPGTPNRIFFSDIHFGNIQQINDDGSRRITIVENVGSVEGLAYHRGWDTLYWTSYTTSTITRHTVDQTRPGAFERETVITMSGDDHPRAFVLDECQNLMFWTNWNEQHPSIMRAALSGANVLTLIEKDIRTPNGLAIDHRAEKLYFSDATLDKIERCEYDGSHRYVILKSEPVHPFGLAVYGEHIFWTDWVRRAVQRANKHVGSNMKLLRVDIPQQPMGIIAVANDTNSCELSPCRINNGGCQDLCLLTHQGHVNCSCRGGRILQDDLTCRAVNSSCRAQDEFECANGECINFSLTCDGVPHCKDKSDEKPSYCNSRRCKKTFRQCSNGRCVSNMLWCNGADDCGDGSDEIPCNKTACGVGEFRCRDGTCIGNSSRCNQFVDCEDASDEMNCSATDCSSYFRLGVKGVLFQPCERTSLCYAPSWVCDGANDCGDYSDERDCPGVKRPRCPLNYFACPSGRCIPMSWTCDKEDDCEHGEDETHCNKFCSEAQFECQNHRCISKQWLCDGSDDCGDGSDEAAHCEGKTCGPSSFSCPGTHVCVPERWLCDGDKDCADGADESIAAGCLYNSTCDDREFMCQNRQCIPKHFVCDHDRDCADGSDESPECEYPTCGPSEFRCANGRCLSSRQWECDGENDCHDQSDEAPKNPHCTSQEHKCNASSQFLCSSGRCVAEALLCNGQDDCGDSSDERGCHINECLSRKLSGCSQDCEDLKIGFKCRCRPGFRLKDDGRTCADVDECSTTFPCSQRCINTHGSYKCLCVEGYAPRGGDPHSCKAVTDEEPFLIFANRYYLRKLNLDGSNYTLLKQGLNNAVALDFDYREQMIYWTDVTTQGSMIRRMHLNGSNVQVLHRTGLSNPDGLAVDWVGGNLYWCDKGRDTIEVSKLNGAYRTVLVSSGLREPRALVVDVQNGYLYWTDWGDHSLIGRIGMDGSSRSVIVDTKITWPNGLTLDYVTERIYWADAREDYIEFASLDGSNRHVVLSQDIPHIFALTLFEDYVYWTDWETKSINRAHKTTGTNKTLLISTLHRPMDLHVFHALRQPDVPNHPCKVNNGGCSNLCLLSPGGGHKCACPTNFYLGSDGRTCVSNCTASQFVCKNDKCIPFWWKCDTEDDCGDHSDEPPDCPEFKCRPGQFQCSTGICTNPAFICDGDNDCQDNSDEANCDIHVCLPSQFKCTNTNRCIPGIFRCNGQDNCGDGEDERDCPEVTCAPNQFQCSITKRCIPRVWVCDRDNDCVDGSDEPANCTQMTCGVDEFRCKDSGRCIPARWKCDGEDDCGDGSDEPKEECDERTCEPYQFRCKNNRCVPGRWQCDYDNDCGDNSDEESCTPRPCSESEFSCANGRCIAGRWKCDGDHDCADGSDEKDCTPRCDMDQFQCKSGHCIPLRWRCDADADCMDGSDEEACGTGVRTCPLDEFQCNNTLCKPLAWKCDGEDDCGDNSDENPEECARFVCPPNRPFRCKNDRVCLWIGRQCDGTDNCGDGTDEEDCEPPTAHTTHCKDKKEFLCRNQRCLSSSLRCNMFDDCGDGSDEEDCSIDPKLTSCATNASICGDEARCVRTEKAAYCACRSGFHTVPGQPGCQDINECLRFGTCSQLCNNTKGGHLCSCARNFMKTHNTCKAEGSEYQVLYIADDNEIRSLFPGHPHSAYEQAFQGDESVRIDAMDVHVKAGRVYWTNWHTGTISYRSLPPAAPPTTSNRHRRQIDRGVTHLNISGLKMPRGIAIDWVAGNVYWTDSGRDVIEVAQMKGENRKTLISGMIDEPHAIVVDPLRGTMYWSDWGNHPKIETAAMDGTLRETLVQDNIQWPTGLAVDYHNERLYWADAKLSVIGSIRLNGTDPIVAADSKRGLSHPFSIDVFEDYIYGVTYINNRVFKIHKFGHSPLVNLTGGLSHASDVVLYHQHKQPEVTNPCDRKKCEWLCLLSPSGPVCTCPNGKRLDNGTCVPVPSPTPPPDAPRPGTCNLQCFNGGSCFLNARRQPKCRCQPRYTGDKCELDQCWEHCRNGGTCAASPSGMPTCRCPTGFTGPKCTQQVCAGYCANNSTCTVNQGNQPQCRCLPGFLGDRCQYRQCSGYCENFGTCQMAADGSRQCRCTAYFEGSRCEVNKCSRCLEGACVVNKQSGDVTCNCTDGRVAPSCLTCVGHCSNGGSCTMNSKMMPECQCPPHMTGPRCEEHVFSQQQPGHIASILIPLLLLLLLVLVAGVVFWYKRRVQGAKGFQHQRMTNGAMNVEIGNPTYKMYEGGEPDDVGGLLDADFALDPDKPTNFTNPVYATLYMGGHGSRHSLASTDEKRELLGRGPEDEIGDPLA

SEQ ID NO: 309 - protein, 2362 aa, Homo sapiens
MSNGYRTLSQHLNDLKKENFSLKLRIYFLEERMQQKYEASREDIYKRNIELKVEVESLKRELQDKKQHLDKTWADVENLNSQNEAELRRQFEERQQETEHVYELLENKIQLLQEESRLAKNEAARMAALVEAEKECNLELSEKLKGVTKNWEDVPGDQVKPDQYTEALAQRDKRIEELNQSLAAQERLVEQLSREKQQLLHLLEEPTSMEVQPMTEELLKQQKLNSHETTITQQSVSDSHLAELQEKIQQTEATNKILQEKLNEMSYELKCAQESSQKQDGTIQNLKETLKSRERETEELYQVIEGQNDTMAKLREMLHQSQLGQLHSSEGTSPAQQQVALLDLQSALFCSQLEIQKLQRVVRQKERQLADAKQCVQFVEAAAHESEQQKEASWKHNQELRKALQQLQEELQNKSQQLRAWEAEKYNEIRTQEQNIQHLNHSLSHKEQLLQEFRELLQYRDNSDKTLEANEMLLEKLRQRIHDKAVALERAIDEKFSALEEKEKELRQLRLAVRERDHDLERLRDVLSSNEATMQSMESLLRAKGLEVEQLSTTCQNLQWLKEEMETKFSRWQKEQESIIQQLQTSLHDRNKEVEDLSATLLCKLGPGQSEIAEELCQRLQRKERMLQDLLSDRNKQVLEHEMEIQGLLQSVSTREQESQAAAEKLVQALMERNSELQALRQYLGGRDSLMSQAPISNQQAEVTPTGCLGKQTDQGSMQIPSRDDSTSLTAKEDVSIPRSTLGDLDTVAGLEKELSNAKEELELMAKKERESQMELSALQSMMAVQEEELQVQAADMESLTRNIQIKEDLIKDLQMQLVDPEDIPAMERLTQEVLLLREKVASVESQGQEISGNRRQQLLLMLEGLVDERSRLNEALQAERQLYSSLVKFHAHPESSERDRTLQVELEGAQVLRSRLEEVLGRSLERLNRLETLAAIGGAAAGDDTEDTSTEFTDSIEEEAAHHSHQQLVKVALEKSLATVETQNPSFSPPSPMGGDSNRCLQEEMLHLRAEFHQHLEEKRKAEEELKELKAQIEEAGFSSVSHIRNTMLSLCLENAELKEQMGEAMSDGWEIEEDKEKGEVMVETVVTKEGLSESSLQAEFRKLQGKLKNAHNIINLLKEQLVLSSKEGNSKLTPELLVHLTSTIERINTELVGSPGKHQHQEEGNVTVRPFPRPQSLDLGATFTVDAHQLDNQSQPRDPGPQSAFSLPGSTQHLRSQLSQCKQRYQDLQEKLLLSEATVFAQANELEKYRVMLTGESLVKQDSKQIQVDLQDLGYETCGRSENEAEREETTSPECEEHNSLKEMVLMEGLCSEQGRRGSTLASSSERKPLENQLGKQEEFRVYGKSENILVLRKDIKDLKAQLQNANKVIQNLKSRVRSLSVTSDYSSSLERPWKLRAVGTLEGSSPHSVPDEDEGWLSDGTGAFYSPGLQAKKDLESLIQRVSQLEAQLPKNGLEEKLAEELRSASWPGKYDSLIQDQARELSYLRQKIREGRGICYLITRHAKDTVKSFEDLLRSNDIDYYLGQSFREQLAQGSQLTERLTSKLSTKDHKSEKDQAGLEPLALRLSRELQEKEKVIEVLQAKLDARSLTPSSSHALSDSHRSPSSTSFLSDELEACSDMDIVSEYTHYEEKKASPSHSDSIHHSSHSAVLSSKPSSTSASQGAKAESNSNPISLPTPQNTPKEANQAHSGFHFHSIPKLASLPQAPLPSAPSSFLPFSPTGPLLLGCCETPVVSLAEAQQELQMLQKQLGESASTVPPASTATLLSNDLEADSSYYLNSAQPHSPPRGTIELGRILEPGYLGSSGKWDVMRPQKGSVSGDLSSGSSVYQLNSKPTGADLLEEHLGEIRNLRQRLEESICINDRLREQLEHRLTSTARGRGSTSNFYSQGLESIPQLCNENRVLREDNRRLQAQLSHVSREHSQETESLREALLSSRSHLQELEKELEHQKVERQQLLEDLREKQQEVLHFREERLSLQENDSRLQHKLVLLQQQCEEKQQLFESLQSELQIYEALYGNSKKGLKAYSLDACHQIPLSSDLSHLVAEVRALRGQLEQSIQGNNCLRLQLQQQLESGAGKASLSPSSINQNFPASTDPGNKQLLLQDSAVSPPVRDVGMNSPALVFPSSASSTPGSETPIINRANGLGLDTSPVMKTPPKLEGDATDGSFANKHGRHVIGHIDDYSALRQQIAEGKLLVKKIVSLVRSACSFPGLEAQGTEVLGSKGIHELRSSTSALHHALEESASLLTMFWRAALPSTHIPVLPGKVGESTERELLELRTKVSKQERLLQSTTEHLKNANQQKESMEQFIVSQLTRTHDVLKKARTNLEEPCKKRSHQKSLKQQERWACPPFVQLPIC

SEQ ID NO: 310 - protein, 3530 aa, Homo sapiens
MAKEEDEEKKAKKGKKGKKAPEPEKPKRSLKGTSRLFMGFRDRTPKISKKGQFRSASAFFWGLHTGPQKTKRKRKARTVLKSTSKLMTQMRMGKKKRAMKGKKPSFMVIRFPGRRGYGRLRPRARSLSKASTAINWLTKKFLLKKAEESGSEQATVDAWLQRSSSRMGSRKLPFPSGAEILRPGGRLRRFPRSRSIYASGEPLGFLPFEDEAPFHHSGSRKSLYGLEGFQDLGEYYDYHRDGDDYYDRQSLHRYEEQEPYLAGLGPYSPAWPPYGDHYYGYPPEDPYDYYHPDYYGGPFDPGYTYGYGYDDYEPPYAPPSGYSSPYSYHDGYEGEAHPYGYYLDPYAPYDAPYPPYDLPYHTPYDVPYFDPYGVHYTVPYAEGVYGGGDEAIYPPEVPYFYPEESASAFVYPWVPPPIPSPHNPYAHAMDDIAELEEPEDAGVERQGTSFRLPSAAFFEQQGMDKPARSKLSLIRKFRLFPRPQVKLFGKEKLEVPLPPSLDIPLPLGDADEEEDEEELPPVSAVPYGHPFWGFLTPRQRNLQRALSAFGAHRGLGFGPEFGRPVPRPATSLARFLKKTLSEKKPIARLRGSQKARAGGPAVREAAYKRFGYKLAGMDPEKPGTPIVLRRAQPRARSSNDARRPPAPQPAPRTLSHWSALLSPPVPPRPPSSGPPPAPPLSPALSGLPRPASPYGSLRRHPPPWAAPAHVPPAPQASWWAFVEPPAVSPEVPPDLLAFPGPRPSFRGSRRRGAAFGFPGASPRASRRRAWSPLASPQPSLRSSPGLGYCSPLAPPSPQLSLRTGPFQPPFLPPARRPRSLQESPAPRRAAGRLGPPGSPLPGSPRPPSPPLGLCHSPRRSSLNLPSRLPHTWRRLSEPPTRAVKPQVRLPFHRPPRAGAWRAPLEHRESPREPEDSETPWTVPPLAPSWDVDMPPTQRPPSPWPGGAGSRRGFSRPPPVPENPFLQLLGPVPSPTLQPEDPAADMTRVFLGRHHEPGPGQLTKSAGPTPEKPEEEATLGDPQLPAETKPPTPAPPKDVTPPKDITPPKDVLPEQKTLRPSLSYPLAACDQTRATWPPWHRWGTLPQAAAPLAPIRAPEPLPKGGERRQAAPGRFAVVMPRVQKLSSFQRVGPATLKPQVQPIQDPKPRACSLRWSCLWLRADAYGPWPRVHTHPQSCHLGPGAACLSLRGSWEEVGPPSWRNKMHSIRNLPSMRFREQHGEDGVEDMTQLEDLQETTVLSNLKIRFERNLIYTYIGSILVSVNPYQMFGIYGPEQVQQYNGRALGENPPHLFAVANLAFAKMLDAKQNQCIIISGESGSGKTEATKLILRYLAAMNQKREVMQQIKILEATPLLESFGNAKTVRNDNSSRFGKFVEIFLEGGVISGAITSQYLLEKSRIVFQAKNERNYHIFYELLAGLPAQLRQAFSLQEAETYYYLNQGGNCEIAGKSDADDFRRLLAAMEVLGFSSEDQDSIFRILASILHLGNVYFEKYETDAQEVASVVSAREIQAVAELLQISPEGLQKAITFKVTETMREKIFTPLTVESAVDARDAIAKVLYALLFSWLITRVNALVSPRQDTLSIAILDIYGFEDLSFNSFEQLCINYANENLQYLFNKIVFQEEQEEYIREQIDWQEITFADNQPCINLISLKPYGILRILDDQCCFPQATDHTFLQKCHYHHGANPLYSKPKMPLPEFTIKHYAGKVTYQVHKFLDKNHDQVRQDVLDLFVRSRTRVVAHLFSSHAPQAAPQRLGKSSSVTRLYKAHTVAAKFQQSLLDLVEKMERCNPLFMRCLKPNHKKEPGLFEPDVVMAQLRYSGVLETVRIRKEGFPVRLPFQGFIDRYCCLVALKHDLPANGDMCVSVLSRLCKVMPNMYRVGVSKLFLKEHLYQLLESMREHVLNLAALTLQRCLRGFFIKRRFRSLRHKIILLQSRARGYLARQRYQQMRRSLVKFRSLVHAYVSRRRYLKLRAEWRCQVEGALLWEQEELSKREVVAVGHLEVPAELAGLLQAVAGLGLAQVPQVAPVRTPRLQAEPRVTLPLDINNYPMAKFVQCHFKEPAFGMLTVPLRTPLTQLPAEHHAEAVSIFKLILRFMGDPHLHGARENIFGNYIVQKGLAVPELRDEILAQLANQVWHNHNAHNAERGWLLLAACLSGFAPSPCFNKYLLKFVSDYGRNGFQAVCQHRLMQAMGRAQQQGSGAARTLPPTQLEWTATYEKASMALDVGCFNGDQFSCPVHSWSTGEEVAGDILRHRGLADGWRGWTVAMKNGVQWAELAGHDYVLDLVSDLELLRDFPRQKSYFIVGTEGPAASRGGPKVVFGNSWDSDEDMSTRPQPQEHMPKVLDSDGYSSHNQDGTNGETEAQRGTATHQESDSLGEPAVPHKGLDCYLDSLFDPVLSYGDADLEKPTAIAYRMKGGGQPGGGSSSGTEDTPRRPPEPKPIPGLDASTLALQQAFIHKQAVLLAREMTLQATALQQQPLSAALRSLPAEKPPAPEAQPTSVGTGPPAKPVLLRATPKPLAPAPLAKAPRLPIKPVAAPVLAQDQASPETTSPSPELVRYSTLNSEHFPQPTQQIKNIVRQYQQPFRGGRPEALRKDGGKVFMKRPDPHEEALMILKGQMTHLAAAPGTQVSREAVALVKPVTSAPRPSMAPTSALPSRSLEPPEELTQTRLHRLINPNFYGYQDAPWKIFLRKEVFYPKDSYSHPVQLDLLFRQILHDTLSEACLRISEDERLRMKALFAQNQLDTQKPLVTESVKRAVVSTARDTWEVYFSRIFPATGSVGTGVQLLAVSHVGIKLLRMVKGGQEAGGQLRVLRAYSFADILFVTMPSQNMLEFNLASEKVILFSARAHQVKTLVDDFILELKKDSDYVVAVRNFLPEDPALLAFHKGDIIHLQPLEPPRVGYSAGCVVRRKVVYLEELRRRGPDFGWRFGTIHGRVGRFPSELVQPAAAPDFLQLPTEPGRGRAAAVAAAVASAAAAQEVGRRREGPPVRARSADHGEDALALPPYTMLEFAQKYFRDPQRRPQDGLRLKSKEPRESRTLEDMLCFTKTPLQESLIELSDSSLSKMATDMFLAVMRFMGDAPLKGQSDLDVLCNLLKLCGDHEVMRDECYCQVVKQITDNTSSKQDSCQRGWRLLYIVTAYHSCSEVLHPHLTRFLQDVSRTPGLPFQGIAKACEQNLQKTLRFGGRLELPSSIELRAMLAGRSSKRQLFLLPGGLERHLKIKTCTVALDVVEEICAEMALTRPEAFNEYVIFVVTNRGQHVCPLSRRAYILDVASEMEQVDGGYMLWFRRVLWDQPLKFENELYVTMHYNQVLPDYLKGLFSSVPASRPSEQLLQQVSKLASLQHRAKDHFYLPSVREVQEYIPAQLYRTTAGSTWLNLVSQHRQQTQALSPHQARAQFLGLLSALPMFGSSFFFIQSCSNIAVPAPCILAINHNGLNFLSTETHELMVKFPLKEIQSTRTQRPTANSSYPYVEIALGDVAAQRTLQLQLEQGLELCRVVAVHVENLLSAHEKRLTLPPSEITLL

SEQ ID NO: 311 - protein, 2542 aa, Homo sapiens
MVALSLKICVRHCNVVKTMQFEPSTAVYDACRVIRERVPEAQTGQASDYGLFLSDEDPRKGIWLEAGRTLDYYMLRNGDILEYKKKQRPQKIRMLDGSVKTVMVDDSKTVGELLVTICSRIGITNYEEYSLIQETIEEKKEEGTGTLKKDRTLLRDERKMEKLKAKLHTDDDLNWLDHSRTFREQGVDENETLLLRRKFFYSDQNVDSRDPVQLNLLYVQARDDILNGSHPVSFEKACEFGGFQAQIQFGPHVEHKHKPGFLDLKEFLPKEYIKQRGAEKRIFQEHKNCGEMSEIEAKVKYVKLARSLRTYGVSFFLVKEKMKGKNKLVPRLLGITKDSVMRVDEKTKEVLQEWPLTTVKRWAASPKSFTLDFGEYQESYYSVQTTEGEQISQLIAGYIDIILKKKQSKDRFGLEGDEESTMLEESVSPKKSTILQQQFNRTGKAEHGSVALPAVMRSGSSGPETFNVGSMPSPQQQVMVGQMHRGHMPPLTSAQQALMGTINTSMHAVQQAQDDLSELDSLPPLGQDMASRVWVQNKVDESKHEIHSQVDAITAGTASVVNLTAGDPADTDYTAVGCAITTISSNLTEMSKGVKLLAALMDDEVGSGEDLLRAARTLAGAVSDLLKAVQPTSGEPRQTVLTAAGSIGQASGDLLRQIGENETDERFQDVLMSLAKAVANAAAMLVLKAKNVAQVAEDTVLQNRVIAAATQCALSTSQLVACAKVVSPTISSPVCQEQLIEAGKLVDRSVENCVRACQAATTDSELLKQVSAAASVVSQALHDLLQHVRQFASRGEPIGRYDQATDTIMCVTESIFSSMGDAGEMVRQARVLAQATSDLVNAMRSDAEAEIDMENSKKLLAAAKLLADSTARMVEAAKGAAANPENEDQQQRLREAAEGLRVATNAAAQNAIKKKIVNRLEVAAKQAAAAATQTIAASQNAAVSNKNPAAQQQLVQSCKAVADHIPQLVQGVRGSQAQAEDLSAQLALIISSQNFLQPGSKMVSSAKAAVPTVSDQAAAMQLSQCAKNLATSLAELRTASQKAHEACGPMEIDSALNTVQTLKNELQDAKMAAVESQLKPLPGETLEKCAQDLGSTSKAVGSSMAQLLTCAAQGNEHYTGVAARETAQALKTLAQAARGVAASTTDPAAAHAMLDSARDVMEGSAMLIQEAKQALIAPGDAERQQRLAQVAKAVSHSLNNCVNCLPGQKDVDVALKSIGESSKKLLVDSLPPSTKPFQEAQSELNQAAADLNQSAGEVVHATRGQSGELAAASGKFSDDFDEFLDAGIEMAGQAQTKEDQIQVIGNLKNISMASSKLLLAAKSLSVDPGAPNAKNLLAAAARAVTESINQLITLCTQQAPGQKECDNALRELETVKGMLDNPNEPVSDLSYFDCIESVMENSKVLGESMAGISQNAKTGDLPAFGECVGIASKALCGLTEAAAQAAYLVGISDPNSQAGHQGLVDPIQFARANQAIQMACQNLVDPGSSPSQVLSAATIVAKHTSALCNACRIASSKTANPVAKRHFVQSAKEVANSTANLVKTIKALDGDFSEDNRNKCRIATAPLIEAVENLTAFASNPEFVSIPAQISSEGSQAQEPILVSAKTMLESSSYLIRTARSLAINPKDPPTWSVLAGHSHTVSDSIKSLITSIRDKAPGQRECDYSIDGINRCIRDIEQASLAAVSQSLATRDDISVEALQEQLTSVVQEIGHLIDPIATAARGEAAQLGHKVTQLASYFEPLILAAVGVASKILDHQQQMTVLDQTKTLAESALQMLYAAKEGGGNPKAQHTHDAITEAAQLMKEAVDDIMVTLNEAASEVGLVGGMVDAIAEAMSKLDEGTPPEPKGTFVDYQTTVVKYSKAIAVTAQEMMTKSVTNPEELGGLASQMTSDYGHLAFQGQMAAATAEPEEIGFQIRTRVQDLGHGCIFLVQKAGALQVCPTDSYTKRELIECARAVTEKVSLVLSALQAGNKGTQACITAATAVSGIIADLDTTIMFATAGTLNAENSETFADHRENILKTAKALVEDTKLLVSGAASTPDKLAQAAQSSAATITQLAEVVKLGAASLGSDDPETQVVLINAIKDVAKALSDLISATKGAASKPVDDPSMYQLKGAAKVMVTNVTSLLKTVKAVEDEATRGTRALEATIECIKQELTVFQSKDVPEKTSSPEESIRMTKGITMATAKAVAAGNSCRQEDVIATANLSRKAVSDMLTACKQASFHPDVSDEVRTRALRFGTECTLGYLDLLEHVLVILQKPTPEFKQQLAAFSKRVAGAVTELIQAAEAMKGTEWVDPEDPTVIAETELLGAAASIEAAAKKLEQLKPRAKPKQADETLDFEEQILEAAKSIAAATSALVKSASAAQRELVAQGKVGSIPANAADDGQWSQGLISAARMVAAATSSLCEAANASVQGHASEEKLISSAKQVAASTAQLLVACKVKADQDSEAMRRLQAAGNAVKRASDNLVRAAQKAAFGKADDDDVVVKTKFVGGIAQIIAAQEEMLKKERELEEARKKLAQIRQQQYKFLPTELREDEG

SEQ ID NO: 312 - protein, 3623 aa, Homo sapiens
MMNMSLPFLWSLLTLLIFAEVNGEAGELELQRQKRSINLQQPRMATERGNLVFLTGSAQNIEFRTGSLGKIKLNDEDLSECLHQIQKNKEDIIELKGSAIGLPQNISSQIYQLNSKLVDLERKFQGLQQTVDKKVCSSNPCQNGGTCLNLHDSFFCICPPQWKGPLCSADVNECEIYSGTPLSCQNGGTCVNTMGSYSCHCPPETYGPQCASKYDDCEGGSVARCVHGICEDLMREQAGEPKYSCVCDAGWMFSPNSPACTLDRDECSFQPGPCSTLVQCFNTQGSFYCGACPTGWQGNGYICEDINECEINNGGCSVAPPVECVNTPGSSHCQACPPGYQGDGRVCTLTDICSVSNGGCHPDASCSSTLGSLPLCTCLPGYTGNGYGPNGCVQLSNICLSHPCLNGQCIDTVSGYFCKCDSGWTGVNCTENINECLSNPCLNGGTCVDGVDSFSCECTRLWTGALCQVPQQVCGESLSGINGSFSYRSPDVGYVHDVNCFWVIKTEMGKVLRITFTFFRLESMDNCPHEFLQVYDGDSSSAFQLGRFCGSSLPHELLSSDNALYFHLYSEHLRNGRGFTVRWETQQPECGGILTGPYGSIKSPGYPGNYPPGRDCVWIVVTSPDLLVTFTFGTLSLEHHDDCNKDYLEIRDGPLYQDPLLGKFCTTFSVPPLQTTGPFARIHFHSDSQISDQGFHITYLTSPSDLRCGGNYTDPEGELFLPELSGPFTHTRQCVYMMKQPQGEQIQINFTHVELQCQSDSSQNYIEVRDGETLLGKVCGNGTISHIKSITNSVWIRFKIDASVEKASFRAVYQVACGDELTGEGVIRSPFFPNVYPGERTCRWTIHQPQSQVILLNFTVFEIGSSAHCETDYVEIGSSSILGSPENKKYCGTDIPSFITSVYNFLYVTFVKSSSTENHGFMAKFSAEDLACGEILTESTGTIQSPGHPNVYPHGINCTWHILVQPNHLIHLMFETFHLEFHYNCTNDYLEVYDTDSETSLGRYCGKSIPPSLTSSGNSLMLVFVTDSDLAYEGFLINYEAISAATACLQDYTDDLGTFTSPNFPNNYPNNWECIYRITVRTGQLIAVHFTNFSLEEAIGNYYTDFLEIRDGGYEKSPLLGIFYGSNLPPTIISHSNKLWLKFKSDQIDTRSGFSAYWDGSSTGCGGNLTTSSGTFISPNYPMPYYHSSECYWWLKSSHGSAFELEFKDFHLEHHPNCTLDYLAVYDGPSSNSHLLTQLCGDEKPPLIRSSGDSMFIKLRTDEGQQGRGFKAEYRQTCENVVIVNQTYGILESIGYPNPYSENQHCNWTIRATTGNTVNYTFLAFDLEHHINCSTDYLELYDGPRQMGRYCGVDLPPPGSTTSSKLQVLLLTDGVGRREKGFQMQWFVYGCGGELSGATGSFSSPGFPNRYPPNKECIWYIRTDPGSSIQLTIHDFDVEYHSRCNFDVLEIYGGPDFHSPRIAQLCTQRSPENPMQVSSTGNELAIRFKTDLSINGRGFNASWQAVTGGCGGIFQAPSGEIHSPNYPSPYRSNTDCSWVIRVDRNHRVLLNFTDFDLEPQDSCIMAYDGLSSTMSRLARTCGREQLANPIVSSGNSLFLRFQSGPSRQNRGFRAQFRQACGGHILTSSFDTVSSPRFPANYPNNQNCSWIIQAQPPLNHITLSFTHFELERSTTCARDFVEILDGGHEDAPLRGRYCGTDMPHPITSFSSALTLRFVSDSSISAGGFHTTVTASVSACGGTFYMAEGIFNSPGYPDIYPPNVECVWNIVSSPGNRLQLSFISFQLEDSQDCSRDFVEIREGNATGHLVGRYCGNSFPLNYSSIVGHTLWVRFISDGSGSGTGFQATFMKIFGNDNIVGTHGKVASPFWPENYPHNSNYQWTVNVNASHVVHGRILEMDIEEIQNCYYDKLRIYDGPSIHARLIGAYCGTQTESFSSTGNSLTFHFYSDSSISGKGFLLEWFAVDAPDGVLPTIAPGACGGFLRTGDAPVFLFSPGWPDSYSNRVDCTWLIQAPDSTVELNILSLDIESHRTCAYDSLVIRDGDNNLAQQLAVLCGREIPGPIRSTGEYMFIRFTSDSSVTRAGFNASFHKSCGGYLHADRGIITSPKYPETYPSNLNCSWHVLVQSGLTIAVHFEQPFQIPNGDSSCNQGDYLVLRNGPDICSPPLGPPGGNGHFCGSHASSTLFTSDNQMFVQFISDHSNEGQGFKIKYEAKSLACGGNVYIHDADSAGYVTSPNHPHNYPPHADCIWILAAPPETRIQLQFEDRFDIEVTPNCTSNYLELRDGVDSDAPILSKFCGTSLPSSQWSSGEVMYLRFRSDNSPTHVGFKAKYSIAQCGGRVPGQSGVVESIGHPTLPYRDNLFCEWHLQGLSGHYLTISFEDFNLQNSSGCEKDFVEIWDNHTSGNILGRYCGNTIPDSIDTSSNTAVVRFVTDGSVTASGFRLRFESSMEECGGDLQGSIGTFTSPNYPNPNPHGRICEWRITAPEGRRITLMFNNLRLATHPSCNNEHVIVFNGIRSNSPQLEKLCSSVNVSNEIKSSGNTMKVIFFTDGSRPYGGFTASYTSSEDAVCGGSLPNTPEGNFTSPGYDGVRNYSRNLNCEWTLSNPNQGNSSISIHFEDFYLESHQDCQFDVLEFRVGDADGPLMWRLCGPSKPTLPLVIPYSQVWIHFVTNERVEHIGFHAKYSFTDCGGIQIGDSGVITSPNYPNAYDSLTHCSSLLEAPQGHTITLTFSDFDIEPHTTCAWDSVTVRNGGSPESPIIGQYCGNSNPRTIQSGSNQLVVTFNSDHSLQGGGFYATWNTQTLGCGGIFHSDNGTIRSPHWPQNFPENSRCSWTAITHKSKHLEISFDNNFLIPSGDGQCQNSFVKVWAGTEEVDKALLATGCGNVAPGPVITPSNTFTAVFQSQEAPAQGFSASFVSRCGSNFTGPSGYIISPNYPKQYDNNMNCTYVIEANPLSVVLLTFVSFHLEARSAVTGSCVNDGVHIIRGYSVMSTPFATVCGDEMPAPLTIAGPVLLNFYSNEQITDFGFKFSYRIISCGGVFNFSSGIITSPAYSYADYPNDMHCLYTITVSDDKVIELKFSDFDVVPSTSCSHDYLAIYDGANTSDPLLGKFCGSKRPPNVKSSNNSMLLVFKTDSFQTAKGWKMSFRQTLGPQQGCGGYLTGSNNTFASPDSDSNGMYDKNLNCVWIIIAPVNKVIHLTFNTFALEAASTRQRCLYDYVKLYDGDSENANLAGTFCGSTVPAPFISSGNFLTVQFISDLTLEREGFNATYTIMDMPCGGTYNATWTPQNISSPNSSDPDVPFSICTWVIDSPPHQQVKITVWALQLTSQDCTQNYLQLQDSPQGHGNSRFQFCGRNASAVPVFYSSMSTAMVIFKSGVVNRNSRMSFTYQIADCNRDYHKAFGNLRSPGWPDNYDNDKDCTVTLTAPQNHTISLFFHSLGIENSVECRNDFLEVRNGSNSNSPLLGKYCGTLLPNPVFSQNNELYLRFKSDSVTSDRGYEIIWTSSPSGCGGTLYGDRGSFTSPGYPGTYPNNTYCEWVLVAPAGRLVTINFYFISIDDPGDCVQNYLTLYDGPNASSPSSGPYCGGDTSIAPFVASSNQVFIKFHADYARRPSAFRLTWDS

SEQ ID NO: 313 - protein, 5202 aa, Homo sapiens
MNCPVLSLGSGFLFQVIEMLIFAYFASISLTESRGLFPRLENVGAFKKVSIVPTQAVCGLPDRSTFCHSSAAAESIQFCTQRFCIQDCPYRSSHPTYTALFSAGLSSCITPDKNDLHPNAHSNSASFIFGNHKSCFSSPPSPKLMASFTLAVWLKPEQQGVMCVIEKTVDGQIVFKLTISEKETMFYYRTVNGLQPPIKVMTLGRILVKKWIHLSVQVHQTKISFFINGVEKDHTPFNARTLSGSITDFASGTVQIGQSLNGLEQFVGRMQDFRLYQVALTNREILEVFSGDLLRLHAQSHCRCPGSHPRVHPLAQRYCIPNDAGDTADNRVSRLNPEAHPLSFVNDNDVGTSWVSNVFTNITQLNQGVTISVDLENGQYQVFYIIIQFFSPQPTEIRIQRKKENSLDWEDWQYFARNCGAFGMKNNGDLEKPDSVNCLQLSNFTPYSRGNVTFSILTPGPNYRPGYNNFYNTPSLQEFVKATQIRFHFHGQYYTTETAVNLRHRYYAVDEITISGRCQCHGHADNCDTTSQPYRCLCSQESFTEGLHCDRCLPLYNDKPFRQGDQVYAFNCKPCQCNSHSKSCHYNISVDPFPFEHFRGGGGVCDDCEHNTTGRNCELCKDYFFRQVGADPSAIDVCKPCDCDTVGTRNGSILCDQIGGQCNCKRHVSGRQCNQCQNGFYNLQELDPDGCSPCNCNTSGTVDGDITCHQNSGQCKCKANVIGLRCDHCNFGFKFLRSFNDVGCEPCQCNLHGSVNKFCNPHSGQCECKKEAKGLQCDTCRENFYGLDVTNCKACDCDTAGSLPGTVCNAKTGQCICKPNVEGRQCNKCLEGNFYLRQNNSFLCLPCNCDKTGTINGSLLCNKSTGQCPCKLGVTGLRCNQCEPHRYNLTIDNFQHCQMCECDSLGTLPGTICDPISGQCLCVPNRQGRRCNQCQPGFYISPGNATGCLPCSCHTTGAVNHICNSLTGQCVCQDASIAGQRCDQCKDHYFGFDPQTGRCQPCNCHLSGALNETCHLVTGQCFCKQFVTGSKCDACVPSASHLDVNNLLGCSKTPFQQPPPRGQVQSSSAINLSWSPPDSPNAHWLTYSLLRDGFEIYTTEDQYPYSIQYFLDTDLLPYTKYSYYIETTNVHGSTRSVAVTYKTKPGVPEGNLTLSYIIPIGSDSVTLTWTTLSNQSGPIEKYILSCAPLAGGQPCVSYEGHETSATIWNLVPFAKYDFSVQACTSGGCLHSLPITVTTAQAPPQRLSPPKMQKISSTELHVEWSPPAELNGIIIRYELYMRRLRSTKETTSEESRVFQSSGWLSPHSFVESANENALKPPQTMTTITGLEPYTKYEFRVLAVNMAGSVSSAWVSERTGESAPVFMIPPSVFPLSSYSLNISWEKPADNVTRGKVVGYDINMLSEQSPQQSIPMAFSQLLHTAKSQELSYTVEGLKPYRIYEFTITLCNSVGCVTSASGAGQTLAAAPAQLRPPLVKGINSTTIHLKWFPPEELNGPSPIYQLERRESSLPALMTTMMKGIRFIGNGYCKFPSSTHPVNTDFTGIKASFRTKVPEGLIVFAASPGNQEEYFALQLKKGRLYFLFDPQGSPVEVTTTNDHGKQYSDGKWHEIIAIRHQAFGQITLDGIYTGSSAILNGSTVIGDNTGVFLGGLPRSYTILRKDPEIIQKGFVGCLKDVHFMKNYNPSAIWEPLDWQSSEEQINVYNSWEGCPASLNEGAQFLGAGFLELHPYMFHGGMNFEISFKFRTDQLNGLLLFVYNKDGPDFLAMELKSGILTFRLNTSLAFTQVDLLLGLSYCNGKWNKVIIKKEGSFISASVNGLMKHASESGDQPLVVNSPVYVGGIPQELLNSYQHLCLEQGFGGCMKDVKFTRGAVVNLASVSSGAVRVNLDGCLSTDSAVNCRGNDSILVYQGKEQSVYEGGLQPFTEYLYRVIASHEGGSVYSDWSRGRTTGAAPQSVPTPSRVRSLNGYSIEVTWDEPVVRGVIEKYILKAYSEDSTRPPRMPSASAEFVNTSNLTGILTGLLPFKNYAVTLTACTLAGCTESSHALNISTPQEAPQEVQPPVAKSLPSSLLLSWNPPKKANGIITQYCLYMDGRLIYSGSEENYTVTDLAVFTPHQFLLSACTHVGCTNSSWVLLYTAQLPPEHVDSPVLTVLDSRTIHIQWKQPRKISGILERYVLYMSNHTHDFTIWSVIYNSTELFQDHMLQYVLPGNKYLIKLGACTGGGCTVSEASEALTDEDIPEGVPAPKAHSYSPDSFNVSWTEPEYPNGVITSYGLYLDGILIHNSSELSYRAYGFAPWSLHSFRVQACTAKGCALGPLVENRTLEAPPEGTVNVFVKTQGSRKAHVRWEAPFRPNGLLTHSVLFTGIFYVDPVGNNYTLLNVTKVMYSGEETNLWVLIDGLVPFTNYTVQVNISNSQGSLITDPITIAMPPGAPDGVLPPRLSSATPTSLQVVWSTPARNNAPGSPRYQLQMRSGDSTHGFLELFSNPSASLSYEVSDLQPYTEYMFRLVASNGFGSAHSSWIPFMTAEDKPGPVVPPILLDVKSRMMLVTWQHPRKSNGVITHYNIYLHGRLYLRTPGNVTNCTVMHLHPYTAYKFQVEACTSKGCSLSPESQTVWTLPGAPEGIPSPELFSDTPTSVIISWQPPTHPNGLVENFTIERRVKGKEEVTTLVTLPRSHSMRFIDKTSALSPWTKYEYRVLMSTLHGGTNSSAWVEVTTRPSRPAGVQPPVVTVLEPDAVQVTWKPPLIQNGDILSYEIHMPDPHITLTNVTSAVLSQKVTHLIPFTNYSVTIVACSGGNGYLGGCTESLPTYVTTHPTVPQNVGPLSVIPLSESYVVISWQPPSKPNGPNLRYELLRRKIQQPLASNPPEDLNRWHNIYSGTQWLYEDKGLSRFTTYEYMLFVHNSVGFTPSREVTVTTLAGLPERGANLTASVLNHTAIDVRWAKPTVQDLQGEVEYYTLFWSSATSNDSLKILPDVNSHVIGHLKPNTEYWIFISVFNGVHSINSAGLHATTCDGEPQGMLPPEVVIINSTAVRVIWTSPSNPNGVVTEYSIYVNNKLYKTGMNVPGSFILRDLSPFTIYDIQVEVCTIYACVKSNGTQITTVEDTPSDIPTPTIRGITSRSLQIDWVSPRKPNGIILGYDLLWKTWYPCAKTQKLVQDQSDELCKAVRCQKPESICGHICYSSEAKVCCNGVLYNPKPGHRCCEEKYIPFVLNSTGVCCGGRIQEAQPNHQCCSGYYARILPGEVCCPDEQHNRVSVGIGDSCCGRMPYSTSGNQICCAGRLHDGHGQKCCGRQIVSNDLECCGGEEGVVYNRLPGMFCCGQDYVNMSDTICCSASSGESKAHIKKNDPVPVKCCETELIPKSQKCCNGVGYNPLKYVCSDKISTGMMMKETKECRILCPASMEATEHCGRCDFNFTSHICTVIRGSHNSTGKASIEEMCSSAEETIHTGSVNTYSYTDVNLKPYMTYEYRISAWNSYGRGLSKAVRARTKEDVPQGVSPPTWTKIDNLEDTIVLNWRKPIQSNGPIIYYILLRNGIERFRGTSLSFSDKEGIQPFQEYSYQLKACTVAGCATSSKVVAATTQGVPESILPPSITALSAVALHLSWSVPEKSNGVIKEYQIRQVGKGLIHTDTTDRRQHTVTGLQPYTNYSFTLTACTSAGCTSSEPFLGQTLQAAPEGVWVTPRHIIINSTTVELYWSLPEKPNGLVSQYQLSRNGNLLFLGGSEEQNFTDKNLEPNSRYTYKLEVKTGGGSSASDDYIVQTPMSTPEEIYPPYNITVIGPYSIFVAWIPPGILIPEIPVEYNVLLNDGSVTPLAFSVGHHQSTLLENLTPFTQYEIRIQACQNGSCGVSSRMFVKTPEAAPMDLNSPVLKALGSACIEIKWMPPEKPNGIIINYFIYRRPAGIEEESVLFVWSEGALEFMDEGDTLRPFTLYEYRVRACNSKGSVESLWSLTQTLEAPPQDFPAPWAQATSAHSVLLNWTKPESPNGIISHYRVVYQERPDDPTFNSPTVHAFTVKGTSHQAHLYGLEPFTTYRIGVVAANHAGEILSPWTLIQTLESSPSGLRNFIVEQKENGRALLLQWSEPMRTNGVIKTYNIFSDGFLEYSGLNRQFLFRRLDPFTLYTLTLEACTRAGCAHSAPQPLWTDEAPPDSQLAPTVHSVKSTSVELSWSEPVNPNGKIIRYEVIRRCFEGKAWGNQTIQADEKIVFTEYNTERNTFMYNDTGLQPWTQCEYKIYTWNSAGHTCSSWNVVRTLQAPPEGLSPPVISYVSMNPQKLLISWIPPEQSNGIIQSYRLQRNEMLYPFSFDPVTFNYTDEELLPFSTYSYALQACTSGGCSTSKPTSITTLEAAPSEVSPPDLWAVSATQMNVCWSPPTVQNGKITKYLVRYDNKESLAGQGLCLLVSHLQPYSQYNFSLVACTNGGCTASVSKSAWTMEALPENMDSPTLQVTGSESIEITWKPPRNPNGQIRSYELRRDGTIVYTGLETRYRDFTLTPGVEYSYTVTASNSQGGILSPLVKDRTSPSAPSGMEPPKLQARGPQEILVNWDPPVRTNGDIINYTLFIRELFERETKIIHINTTHNSFGMQSYIVNQLKPFHRYEIRIQACTTLGCASSDWTFIQTPEIAPLMQPPPHLEVQMAPGGFQPTVSLLWTGPLQPNGKVLYYELYRRQIATQPRKSNPVLIYNGSSTSFIDSELLPFTEYEYQVWAVNSAGKAPSSWTWCRTGPAPPEGLRAPTFHVISSTQAVVNISAPGKPNGIVSLYRLFSSSAHGAETVLSEGMATQQTLHGLQAFTNYSIGVEACTCFNCCSKGPTAELRTHPAPPSGLSSPQIGTLASRTASFRWSPPMFPNGVIHSYELQFHVACPPDSALPCTPSQIETKYTGLGQKASLGGLQPYTTYKLRVVAHNEVGSTASEWISFTTQKELPQYRAPFSVDSNLSVVCVNWSDTFLLNGQLKEYVLTDGGRRVYSGLDTTLYIPRTADKTFFFQVICTTDEGSVKTPLIQYDTSTGLGLVLTTPGKKKGSRSKSTEFYSELWFIVLMAMLGLILLAIFLSLILQRKIHKEPYIRERPPLVPLQKRMSPLNVYPPGENHMGLADTKIPRSGTPVSIRSNRSACVLRIPSQNQTSLTYSQGSLHRSVSQLMDIQDKKVLMDNSLWEAIMGHNSGLYVDEEDLMNAIKDFSSVTKERTTFTDTHL

SEQ ID NO: 314 - protein, 1972 aa, Homo sapiens
MGDDSEWLKLPVDQKCEHKLWKARLSGYEEALKIFQKIKDEKSPEWSKFLGLIKKFVTDSNAVVQLKGLEAALVYVENAHVAGKTTGEVVSGVVSKVFNQPKAKAKELGIEICLMYIEIEKGEAVQEELLKGLDNKNPKIIVACIETLRKALSEFGSKIILLKPIIKVLPKLFESREKAVRDEAKLIAVEIYRWIRDALRPPLQNINSVQLKELEEEWVKLPTSAPRPTRFLRSQQELEAKLEQQQSAGGDAEGGGDDGDEVPQIDAYELLEAVEILSKLPKDFYDKIEAKKWQERKEALESVEVLIKNPKLEAGDYADLVKALKKVVGKDTNVMLVALAAKCLTGLAVGLRKKFGQYAGHVVPTILEKFKEKKPQVVQALQEAIDAIFLTTTLQNISEDVLAVMDNKNPTIKQQTSLFIARSFRHCTASTLPKSLLKPFCAALLKHINDSAPEVRDAAFEALGTALKVVGEKAVNPFLADVDKLKLDKIKECSEKVELIHGKKAGLAADKKEFKPLPGRTAASGAAGDKDTKDISAPKPGPLKKAPAAKAGGPPKKGKPAAPGGAGNTGTKNKKGLETKEIVEPELSIEVCEEKASAVLPPTCIQLLDSSNWKERLACMEEFQKAVELMDRTEMPCQALVRMLAKKPGWKETNFQVMQMKLHIVALIAQKGNFSKTSAQVVLDGLVDKIGDVKCGNNAKEAMTAIAEACMLPWTAEQVVSMAFSQKNPKNQSETLNWLSNAIKEFGFSGLNVKAFISNVKTALAATNPAVRTAAITLLGVMYLYVGPSLRMFFEDEKPALLSQIDAEFEKMQGQSPPAPTRGISKHSTSGTDEGEDGDEPDDGSNDVVDLLPRTEISDKITSELVSKIGDKNWKIRKEGLDEVAGIINDAKFIQPNIGELPTALKGRLNDSNKILVQQTLNILQQLAVAMGPNIKQHVKNLGIPIITVLGDSKNNVRAAALATVNAWAEQTGMKEWLEGEDLSEELKKENPFLRQELLGWLAEKLPTLRSTPTDLILCVPHLYSCLEDRNGDVRKKAQDALPFFMMHLGYEKMAKATGKLKPTSKDQVLAMLEKAKVNMPAKPAPPTKATSKPMGGSAPAKFQPASAPAEDCISSSTEPKPDPKKAKAPGLSSKAKSAQGKKMPSKTSLKEDEDKSGPIFIVVPNGKEQRMKDEKGLKVLKWNFTTPRDEYIEQLKTQMSSCVAKWLQDEMFHSDFQHHNKALAVMVDHLESEKEGVIGCLDLILKWLTLRFFDTNTSVLMKALEYLKLLFTLLSEEEYHLTENEASSFIPYLVVKVGEPKDVIRKDVRAILNRMCLVYPASKMFPFIMEGTKSKNSKQRAECLEELGCLVESYGMNVCQPTPGKALKEIAVHIGDRDNAVRNAALNTIVTVYNVHGDQVFKLIGNLSEKDMSMLEERIKRSAKRPSAAPIKQVEEKPQRAQNISSNANMLRKGPAEDMSSKLNQARSMSGHPEAAQMVRREFQLDLDEIENDNGTVRCEMPELVQHKLDDIFEPVLIPEPKIRAVSPHFDDMHSNTASTINFIISQVASGDINTSIQALTQLFQIESLAREASTGVLKDLMHGLITLMLDSRIEDLEEGQQVIRSVNLLVVKVLEKSDQTNILSALLVLLQDSLLATASSPKFSELVMKCLWRMVRLLPDTINSINLDRILLDIHIFMKVFPKEKLKQCKSEFPIRTLKTLLHTLCKLKGPKILDHLTMIDNKNESELEAHLCRMMKHSMDQTGSKSDKETEKGASRIDEKSSKAKVNDFLAEIFKKIGSKENTKEGLAELYEYKKKYSDADIEPFLKNSSQFFQSYVERGLRVIEMEREGKGRISTSTGISPQMEVTCVPTPTSTVSSIGNTNGEEVGPSVYLERLKILRQRCGLDNTKQDDRPPLTSLLSKPAVPTVASSTDMLHSKLSQLRESREQHQHSDLDSNQTHSSGTVTSSSSTANIDDLKKRLERIKSSRK

SEQ ID NO: 315 - protein, 1963 aa, Homo sapiens
MKQRKGQGSGGSRGRKKRGLSDISPSTSLPPLVEGQLRCFLKLTVNRVIWKIAKPPTCVLVRVRWWGETSDGTLFCPRDALQTEPKAVRTTTRYAIRCGPKQFTSYLTDMAVLVLEVITKLDGLPIGRVQINGLAQLSPTHQINGFFTIVSSTSKKLGELQVSLALEPLSETYDSYHPLPTTDMTENVLLSKQGFRENTEPSSTQFQVPSRPRDIHTIKIDGKELAANSSRSTTPRGKDHVCFAENPDTIKDSSFGLQHSLNSGQSLESVTLKGRAPRKQMSLLNSSEFQPQIRTVAKSHSDSCILSSNNLPTKDLLSALLEQGNKLRNAMVISAMKSSPETSMLLDQVHPPINEDSLRASTQIRAFSRNRFKDHIEDHLLPSTENTFWRHDTKADTRAIQLLLGSAELSQGNFWDGLGSPPDSPSPGSDVYCISELNDPQYDQSLLENLFYTAPKSDTSISDFLSEEDDIVPSKKISQSTALARSSKVLESSDHKLKKRSAGKRNRNLVEQQMLSETPEDAQTMTLSVDRLALLGRTHSVRIIIETMGVPPDSPQMTPGKKSYAGPPPKVTTAKKRTFFVEYHFPVGFSESGLGKTALITEVVRLASSKITDGKVKFQQRFVFPVQFGGPMIEHWWNSNLTFQIYVKKTPQKKPEVIGSVSLSLRAVIQSELLSFSDQLPVQQENGQSPFGPLKVTMELITDNKDFTGINTKLSGNTHYTPLCAPTSPNKALPELNQDMTCTKNPQNLNQIHEETAKKAQNLVLPNRKSPSPVAPHPSTFVATPASHNLVNQTNGTTKESALLLHVLLMVPDGKDFISGESEKQSPCNVYLNCKLFSTEEVTRSVIAWGTTQPVFNFSQVIPVSLSSKYLERLKNNVMVIETWNKVRSPGQDKLLGLVKLPLHQFYMSFKDAKISRLLLDAQYPVVAVDSYMPVIDVFSGHQNGSLRVFLAMGSSNQIMALQRLKNEEGTLPPFSPRPAHFLDQPTAASVAMAEDRGNGLMEHCFEIHIEMVKGLAPLQATVWGEADCYVQYYFPVQHSQSSVLKGPEFLENGITLKPFRTATTLCVPDPIFNSEHHHSLLLPAEVPVQRLLLSAFSAQGLVPGGGVQFEIWCRYYYPNVRDQKVAKGTLPLSRICAMVTTQHREDVGIQTFNLPLTPRIENRKELRNQSSGLLDVGLRYRRSPRTAEGVLAARTVSISVQIIRACGLQAAAKALAEREPALQFSATVGVNASVTTHLSFLPQGEQRRTHPVACSFCPEFSHHVEFTCNLVTQHCSGEACFLAELLEFAEVIFAVYHENTKSASDIISIESCKEYLLGVVKVPTKELLIKRSGITGWYPIILPEDGGLPHGLELMQKIVGGLELSISFTHRGDRERVLEAAEHLGWSFENSLKDFVRMDEGEPATVTISTPRLWLPIHCVLLAGHNHIHKNTYCYLRYKFYDHEAFWTPLKKPKESVNKKQIMVTFKASKRAEVTRGPSLLWYFREERLEIQVWRAYGNDSVERPHQTDSWIGSAYVDLARLGERSARTLTVSGVYPLFGRNASNLSGAALRVHVVLSSLSSHLEPTHELDSMDCSSHSESEQLPRRNDEVQLSPPEVISCHQKSPASTQVPCSSTTAEVRLTQEGPADLDGTFAVSILVERAMHLSLKGSPLTERKVSIPSCCVSFATADESSPVYTQVVENTDSPIWNFQQQSRLSKELLLDPQQTLVFKVWHKGDEERVIGFASVDLSPLLSGFQFVCGWYNITDFSGECQGQIKVAVSPLESLIHFKEERQARRGVETSKSLIPIYSPFSFPASDTYAAFSSHMARQTLDQLAHASSKELDFSSPGRSDTTRSQASRHEEHVQNIRRFHESLHLQGEAPLPCDDKLTTSPLSSQTSILTSLRKNLSELDQIQRYFRQKLTKPFLPLSPQTQTAISQHQESCRDHLGPGASSLDPGSQCILEKSSNLVLQVSSLITGSY

SEQ ID NO: 316 - protein, 4870 aa, Homo sapiens
MAEGGEGGEDEIQFLRTEDEVVLQCIATIHKEQRKFCLAAEGLGNRLCFLEPTSEAKYIPPDLCVCNFVLEQSLSVRALQEMLANTGENGGEGAAQGGGHRTLLYGHAVLLRHSFSGMYLTCLTTSRSQTDKLAFDVGLREHATGEACWWTIHPASKQRSEGEKVRIGDDLILVSVSSERYLHLSVSNGNIQVDASFMQTLWNVHPTCSGSSIEEGYLLGGHVVRLFHGHDECLTIPSTDQNDSQHRRIFYEAGGAGTRARSLWRVEPLRISWSGSNIRWGQAFRLRHLTTGHYLALTEDQGLILQDRAKSDTKSTAFSFRASKELKEKLDSSHKRDIEGMGVPEIKYGDSVCFVQHIASGLWVTYKAQDAKTSRLGPLKRKVILHQEGHMDDGLTLQRCQREESQAARIIRNTTALFSQFVSGNNRTAAPITLPIEEVLQTLQDLIAYFQPPEEEMRHEDKQNKLRSLKNRQNLFKEEGMLALVLNCIDRLNVYNSVAHFAGIAREESGMAWKEILNLLYKLLAALIRGNRNNCAQFSNNLDWLISKLDRLESSSGILEVLHCILTESPEALNLIAEGHIKSIISLLDKHGRNHKVLDILCSLCLCNGVAVRANQNLICDNLLPRRNLLLQTRLINDVTSIRPNIFLGVAEGSAQYKKWYFELIIDQVDPFLTAEPTHLRVGWASSSGYAPYPGGGEGWGGNGVGDDLYSYGFDGLHLWSGRIPRAVASINQHLLRSDDVVSCCLDLGVPSISFRINGQPVQGMFENFNTDGLFFPVMSFSAGVKVRFLMGGRHGEFKFLPPSGYAPCYEALLPKEKMRLEPVKEYKRDADGIRDLLGTTQFLSQASFIPCPVDTSQVILPPHLEKIRDRLAENIHELWGMNKIELGWTFGKIRDDNKRQHPCLVEFSKLPETEKNYNLQMSTETLKTLLALGCHIAHVNPAAEEDLKKVKLPKNYMMSNGYKPAPLDLSDVKLLPPQEILVDKLAENAHNVWAKDRIKQGWTYGIQQDLKNKRNPRLVPYALLDERTKKSNRDSLREAVRTFVGYGYNIEPSDQELADSAVEKVSIDKIRFFRVERSYAVRSGKWYFEFEVVTGGDMRVGWARPGCRPDVELGADDQAFVFEGNRGQRWHQGSGYFGRTWQPGDVVGCMINLDDASMIFTLNGELLITNKGSELAFADYEIENGFVPICCLGLSQIGRMNLGTDASTFKFYTMCGLQEGFEPFAVNMNRDVAMWFSKRLPTFVNVPKDHPHIEVMRIDGTMDSPPCLKVTHKTFGTQNSNADMIYCRLSMPVECHSSFSHSPCLDSEAFQKRKQMQEILSHTTTQCYYAIRIFAGQDPSCVWVGWVTPDYHLYSEKFDLNKNCTVTVTLGDERGRVHESVKRSNCYMVWGGDIVASSQRSNRSNVDLEIGCLVDLAMGMLSFSANGKELGTCYQVEPNTKVFPAVFLQPTSTSLFQFELGKLKNAMPLSAAIFRSEEKNPVPQCPPRLDVQTIQPVLWSRMPNSFLKVETERVSERHGWVVQCLEPLQMMALHIPEENRCVDILELCEQEDLMRFHYHTLRLYSAVCALGNSRVAYALCSHVDLSQLFYAIDNKYLPGLLRSGFYDLLISIHLASAKERKLMMKNEYIIPITSTTRNIRLFPDESKRHGLPGVGLRTCLKPGFRFSTPCFVVTGEDHQKQSPEIPLESLRTKALSMLTEAVQCSGAHIRDPVGGSVEFQFVPVLKLIGTLLVMGVFDDDDVRQILLLIDPSVFGEHSAGTEEGAEKEEVTQVEEKAVEAGEKAGKEAPVKGLLQTRLPESVKLQMCELLSYLCDCELQHRVEAIVAFGDIYVSKLQANQKFRYNELMQALNMSAALTARKTKEFRSPPQEQINMLLNFQLGENCPCPEEIREELYDFHEDLLLHCGVPLEEEEEEEEDTSWTGKLCALVYKIKGPPKPEKEQPTEEEERCPTTLKELISQTMICWAQEDQIQDSELVRMMFNLLRRQYDSIGELLQALRKTYTISHTSVSDTINLLAALGQIRSLLSVRMGKEEELLMINGLGDIMNNKVFYQHPNLMRVLGMHETVMEVMVNVLGTEKSQIAFPKMVASCCRFLCYFCRISRQNQKAMFEHLSYLLENSSVGLASPSMRGSTPLDVAASSVMDNNELALSLEEPDLEKVVTYLAGCGLQSCPMLLAKGYPDVGWNPIEGERYLSFLRFAVFVNSESVEENASVVVKLLIRRPECFGPALRGEGGNGLLAAMQGAIKISENPALDLPSQGYKREVSTGDDEEEEEIVHMGNAIMSFYSALIDLLGRCAPEMHLIQTGKGEAIRIRSILRSLVPTEDLVGIISIPLKLPSLNKDGSVSEPDMAANFCPDHKAPMVLFLDRVYGIKDQTFLLHLLEVGFLPDLRASASLDTVSLSTTEAALALNRYICSAVLPLLTRCAPLFAGTEHCTSLIDSTLQTIYRLSKGRSLTKAQRDTIEECLLAICNHLRPSMLQQLLRRLVFDVPQLNEYCKMPLKLLTNHYEQCWKYYCLPSGWGSYGLAVEEELHLTEKLFWGIFDSLSHKKYDPDLFRMALPCLSAIAGALPPDYLDTRITATLEKQISVDADGNFDPKPINTMNFSLPEKLEYIVTKYAEHSHDKWACDKSQSGWKYGISLDENVKTHPLIRPFKTLTEKEKEIYRWPARESLKTMLAVGWTVERTKEGEALVQQRENEKLRSVSQANQGNSYSPAPLDLSNVVLSRELQGMVEVVAENYHNIWAKKKKLELESKGGGSHPLLVPYDTLTAKEKFKDREKAQDLFKFLQVNGIIVSRGMKDMELDASSMEKRFAYKFLKKILKYVDSAQEFIAHLEAIVSSGKTEKSPRDQEIKFFAKVLLPLVDQYFTSHCLYFLSSPLKPLSSSGYASHKEKEMVAGLFCKLAALVRHRISLFGSDSTTMVSCLHILAQTLDTRTVMKSGSELVKAGLRAFFENAAEDLEKTSENLKLGKFTHSRTQIKGVSQNINYTTVALLPILTSIFEHVTQHQFGMDLLLGDVQISCYHILCSLYSLGTGKNIYVERQRPALGECLASLAAAIPVAFLEPTLNRYNPLSVFNTKTPRERSILGMPDTVEDMCPDIPQLEGLMKEINDLAESGARYTEMPHVIEVILPMLCNYLSYWWERGPENLPPSTGPCCTKVTSEHLSLILGNILKIINNNLGIDEASWMKRIAVYAQPIISKARPDLLRSHFIPTLEKLKKKAVKTVQEEEQLKADGKGDTQEAELLILDEFAVLCRDLYAFYPMLIRYVDNNRSNWLKSPDADSDQLFRMVAEVFILWCKSHNFKREEQNFVIQNEINNLAFLTGDSKSKMSKAMQVKSGGQDQERKKTKRRGDLYSIQTSLIVAALKKMLPIGLNMCTPGDQELISLAKSRYSHRDTDEEVREHLRNNLHLQEKSDDPAVKWQLNLYKDVLKSEEPFNPEKTVERVQRISAAVFHLEQVEQPLRSKKAVWHKLLSKQRKRAVVACFRMAPLYNLPRHRSINLFLHGYQRFWIETEEYSFEEKLVQDLAKSPKVEEEEEEETEKQPDPLHQIILYFSRNALTERSKLEDDPLYTSYSSMMAKSCQSGEDEEEDEDKEKTFEEKEMEKQKTLYQQARLHERGAAEMVLQMISASKGEMSPMVVETLKLGIAILNGGNAGVQQKMLDYLKEKKDAGFFQSLSGLMQSCSVLDLNAFERQNKAEGLGMVTEEGTLIVRERGEKVLQNDEFTRDLFRFLQLLCEGHNSDFQNFLRTQMGNTTTVNVIISTVDYLLRLQESISDFYWYYSGKDIIDESGQHNFSKALAVTKQIFNSLTEYIQGPCIGNQQSLAHSRLWDAVVGFLHVFANMQMKLSQDSSQIELLKELLDLLQDMVVMLLSLLEGNVVNGTIGKQMVDTLVESSTNVEMILKFFDMFLKLKDLTSSDTFKEYDPDGKGIISKKEFQKAMEGQKQYTQSEIDFLLSCAEADENDMFNYVDFVDRFHEPAKDIGFNVAVLLTNLSEHMPNDSRLKCLLDPAESVLNYFEPYLGRIEIMGGAKKIERVYFEISESSRTQWEKPQVKESKRQFIFDVVNEGGEQEKMELFVNFCEDTIFEMQLASQISESDSADRPEEEEEDEDSSYVLEIAGEEEEDGSLEPASAFAMACASVKRNVTDFLKRATLKNLRKQYRNVKKMTAKELVKVLFSFFWMLFVGLFQLLFTILGGIFQILWSTVFGGGLVEGAKNIRVTKILGDMPDPTQFGIHDDTMEAERAEVMEPGITTELVHFIKGEKGDTDIMSDLFGLHPKKEGSLKHGPEVGLGDLSEIIGKDEPPTLESTVQKKRKAQAAEMKAANEAEGKVESEKADMEDGEKEDKDKEEEQAEYLWTEVTKKKKRRCGQKVEKPEAFTANFFKGLEIYQTKLLHYLARNFYNLRFLALFVAFAINFILLFYKVTEEPLEEETEDVANLWNSFNDEEEEEAMVFFVLQESTGYMAPTLRALAIIHTIISLVCVVGYYCLKVPLVVFKREKEIARKLEFDGLYITEQPSEDDIKGQWDRLVINTPSFPNNYWDKFVKRKVINKYGDLYGAERIAELLGLDKNALDFSPVEETKAEAASLVSWLSSIDMKYHIWKLGVVFTDNSFLYLAWYTTMSVLGHYNNFFFAAHLLDIAMGFKTLRTILSSVTHNGKQLVLTVGLLAVVVYLYTVVAFNFFRKFYNKSEDDDEPDMKCDDMMTCYLFHMYVGVRAGGGIGDEIEDPAGDPYEMYRIVFDITFFFFVIVILLAIIQGLIIDAFGELRDQQEQVREDMETKCFICGIGNDYFDTTPHGFETHTLQEHNLANYLFFLMYLINKDETEHTGQESYVWKMYQERCWDFFPAGDCFRKQYEDQLG

SEQ ID NO: 317 - protein, 1989 aa, Homo sapiens
MATADTPAPASSGLSPKEEGELEDGEISDDDNNSQIRSRSSSSSSGGGLLPYPRRRPPHSARGGGSGGGGGSSSSSSSSQQQLRNFSRSRHASERGHLRGPSSYRPKEPFRSHPPSVRMPSSSLSESSPRPSFWERSHLALDRFRFRGRPYRGGSRWSRGRGVGERGGKPGCRPPLGGGAGSGFSSSQSWREPSPPRKSSKSFGRSPSRKQNYSSKNENCVEETFEDLLLKYKQIQLELECINKDEKLALSSKEENVQEDPKTLNFEDQTSTDNVSITKDSSKEVAPEEKTQVKTFQAFELKPLRQKLTLPGDKNRLKKVKDGAKPLSLKSDTTDSSQGLQDKEQNLTRRISTSDILSEKKLGEDEEELSELQLRLLALQSASKKWQQKEQQVMKESKEKLTKTKTVQQKVKTSTKTHSAKKVSTTAKQALRKQQTKAWKKLQQQKEQERQKEEDQRKQAEEEERRKREEEIRKIRDLSNQEEQYNRFMKLVGGKRRSRSKSSDPDLRRSLDKQPTDSGGGIYQYDNYEEVAMDTDSETSSPAPSPVQPPFFSECSLGYFSPAPSLSLPPPPQVSSLPPLSQPYVEGLCVSLEPLPPLPPLPPLPPEDPEQPPKPPFADEEEEEEMLLREELLKSLANKRAFKPEETSSNSDPPSPPVLNNSHPVPRSNLSIVSINTVSQPRIQNPKFHRGPRLPRTVISLPKHKSVVVTLNDSDDSESDGEASKSTNSVFGGLESMIKEARRTAEQASKPKVPPKSEKENDPLRTPEALPEEKKIEYRLLKEEIANREKQRLIKSDQLKTSSSSPANSDVEIDGIGRIAMVTKQVTDAESKLKKHRILLMKDESVLKNLVQQEAKKKESVRNAEAKITKLTEQLQATEKILNVNRMFLKKLQEQIHRVQQRVTIKKALTLKYGEELARAKAVASKEIGKRKLEQDRFGPNKMMRLDSSPVSSPRKHSAELIAMEKRRLQKLEYEYALKIQKLKEARALKAKEQQNISPVVEEEPEFSLPQPSLHDLTQDKLTLDTEENDVDDEILSGSSRERRRSFLESNYFTKPNLKHTDTANKECINKLNKNTVEKPELFLGLKIGELQKLYSKADSLKQLILKTTTGITEKVLHGQEISVDVDFVTAQSKTMEVKPCPFRPYHSPLLVFKSYRFSPYYRTKEKLPLSSVSYSNMIEPDQCFCRFDLTGTCNDDDCQWQHIQDYTLSRKQLFQDILSYNLSLIGCAETSTNEEITASAEKYVEKLFGVNKDRMSMDQMAVLLVSNINESKGHTPPFTTYKDKRKWKPKFWRKPISDNSFSSDEEQSTGPIKYAFQPENQINVPALDTVVTPDDVRYFTNETDDIANLEASVLENPSHVQLWLKLAYKYLNQNEGECSESLDSALNVLARALENNKDNPEIWCHYLRLFSKRGTKDEVQEMCETAVEYAPDYQSFWTFLHLESTFEEKDYVCERMLEFLMGAAKQETSNILSFQLLEALLFRVQLHIFTGRCQSALAILQNALKSANDGIVAEYLKTSDRCLAWLAYIHLIEFNILPSKFYDPSNDNPSRIVNTESFVMPWQAVQDVKTNPDMLLAVFEDAVKACTDESLAVEERIEACLPLYTNMIALHQLLERYEAAMELCKSLLESCPINCQLLEALVALYLQTNQHDKARAVWLTAFEKNPQNAEVFYHMCKFFILQNRGDNLLPFLRKFIASFFKPGFEKYNNLDLFRYLLNIPGPIDIPSRLCKGNFDDDMFNHQVPYLWLIYCLCHPLQSSIKETVEAYEAALGVAMRCDIVQKIWMDYLVFANNRAAGSRNKVQEFKFFTDLVNRCLVTVPARYPIPFSSADYWSNYEFHNRVIFFYLSCVPKTQHSKTLERFCSVMPANSGLALRLLQHEWEESNVQILKLQAKMFTYNIPTCLATWKIAIAAEIVLKGQREVHRLYQRALQKLPLCASLWKDQLLFEASEGGKTDNLRKLVSKCQEIGVSLNELLNLNSNKTESKNH

SEQ ID NO: 318 - protein, 2663 aa, Homo sapiens
MPKGGCPKAPQQEELPLSSDMVEKQTGKKDKDKVSLTKTPKLERGDGGKEVRERASKRKLPFTAGANGEQKDSDTEKQGPERKRIKKEPVTRKAGLLFGMGLSGIRAGYPLSERQQVALLMQMTAEESANSPVDTTPKHPSQSTVCQKGTPNSASKTKDKVNKRNERGETRLHRAAIRGDARRIKELISEGADVNVKDFAGWTALHEACNRGYYDVAKQLLAAGAEVNTKGLDDDTPLHDAANNGHYKVVKLLLRYGGNPQQSNRKGETPLKVANSPTMVNLLLGKGTYTSSEESSTESSEEEDAPSFAPSSSVDGNNTDSEFEKGLKHKAKNPEPQKATAPVKDEYEFDEDDEQDRVPPVDDKHLLKKDYRKETKSNSFISIPKMEVKSYTKNNTIAPKKASHRILSDTSDEEDASVTVGTGEKLRLSAHTILPGSKTREPSNAKQQKEKNKVKKKRKKETKGREVRFGKRSDKFCSSESESESSESGEDDRDSLGSSGCLKGSPLVLKDPSLFSSLSASSTSSHGSSAAQKQNPSHTDQHTKHWRTDNWKTISSPAWSEVSSLSDSTRTRLTSESDYSSEGSSVESLKPVRKRQEHRKRASLSEKKSPFLSSAEGAVPKLDKEGKVVKKHKTKHKHKNKEKGQCSISQELKLKSFTYEYEDSKQKSDKAILLENDLSTENKLKVLKHDRDHFKKEEKLSKMKLEEKEWLFKDEKSLKRIKDTNKDISRSFREEKDRSNKAEKERSLKEKSPKEEKLRLYKEERKKKSKDRPSKLEKKNDLKEDKISKEKEKIFKEDKEKLKKEKVYREDSAFDEYCNKNQFLENEDTKFSLSDDQRDRWFSDLSDSSFDFKGEDSWDSPVTDYRDMKSDSVAKLILETVKEDSKERRRDSRAREKRDYREPFFRKKDRDYLDKNSEKRKEQTEKHKSVPGYLSEKDKKRRESAEAGRDRKDALESCKERRDGRAKPEEAHREELKECGCESGFKDKSDGDFGKGLEPWERHHPAREKEKKDGPDKERKEKTKPERYKEKSSDKDKSEKSILEKCQKDKEFDKCFKEKKDTKEKHKDTHGKDKERKASLDQGKEKKEKAFPGIISEDFSEKKDDKKGKEKSWYIADIFTDESEDDRDSCMGSGFKMGEASDLPRTDGLQEKEEGREAYASDRHRKSSDKQHPERQKDKEPRDRRKDRGAADAGRDKKEKVFEKHKEKKDKESTEKYKDRKDRASVDSTQDKKNKQKLPEKAEKKHAAEDKAKSKHKEKSDKEHSKERKSSRSADAEKSLLEKLEEEALHEYREDSNDKISEVSSDSFTDRGQEPGLTAFLEVSFTEPPGDDKPRESACLPEKLKEKERHRHSSSSSKKSHDRERAKKEKAEKKEKGEDYKEGGSRKDSGQYEKDFLEADAYGVSYNMKADIEDELDKTIELFSTEKKDKNDSEREPSKKIEKELKPYGSSAINILKEKKKREKHREKWRDEKERHRDRHADGLLRHHRDELLRHHRDEQKPATRDKDSPPRVLKDKSRDEGPRLGDAKLKEKFKDGAEKEKGDPVKMSNGNDKVAPSKDPGKKDARPREKLLGDGDLMMTSFERMLSQKDLEIEERHKRHKERMKQMEKLRHRSGDPKLKEKAKPADDGRKKGLDIPAKKPPGLDPPFKDKKLKESTPIPPAAENKLHPASGADSKDWLAGPHMKEVLPASPRPDQSRPTGVPTPTSVLSCPSYEEVMHTPRTPSCSADDYADLVFDCADSQHSTPVPTAPTSACSPSFFDRFSVASSGLSENASQAPARPLSTNLYRSVSVDIRRTPEEEFSVGDKLFRQQSVPAASSYDSPMPPSMEDRAPLPPVPAEKFACLSPGYYSPDYGLPSPKVDALHCPPAAVVTVTPSPEGVFSSLQAKPSPSPRAELLVPSLEGALPPDLDTSEDQQATAAIIPPEPSYLEPLDEGPFSAVITEEPVEWAHPSEQALASSLIGGTSENPVSWPVGSDLLLKSPQRFPESPKRFCPADPLHSAAPGPFSASEAPYPAPPASPAPYALPVAEPGLEDVKDGVDAVPAAISTSEAAPYAPPSGLESFFSNCKSLPEAPLDVAPEPACVAAVAQVEALGPLENSFLDGSRGLSHLGQVEPVPWADAFAGPEDDLDLGPFSLPELPLQTKDAADGEAEPVEESLAPPEEMPPGAPGVINGGDVSTVVAEEPPALPPDQASTRLPAELEPEPSGEPKLDVALEAAVEAETVPEERARGDPDSSVEPAPVPPEQRPLGSGDQGAEAEGPPAASLCAPDGPAPNTVAQAQAADGAGPEDDTEASRAAAPAEGPPGGIQPEAAEPKPTAEAPKAPRVEEIPQRMTRNRAQMLANQSKQGPPPSEKECAPTPAPVTRAKARGSEDDDAQAQHPRKRRFQRSTQQLQQQLNTSTQQTREVIQQTLAAIVDAIKLDAIEPYHSDRANPYFEYLQIRKKIEEKRKILCCITPQAPQCYAEYVTYTGSYLLDGKPLSKLHIPVIAPPPSLAEPLKELFRQQEAVRGKLRLQHSIEREKLIVSCEQEILRVHCRAARTIANQAVPFSACTMLLDSEVYNMPLESQGDENKSVRDRFNARQFISWLQDVDDKYDRMKTCLLMRQQHEAAALNAVQRMEWQLKVQELDPAGHKSLCVNEVPSFYVPMVDVNDDFVLLPA

SEQ ID NO: 319 - protein, 1584 aa, Homo sapiens
MSLTSWFLVSSGGTRHRLPREMIFVGRDDCELMLQSRSVDKQHAVINYDASTDEHLVKDLGSLNGTFVNDVRIPEQTYITLKLEDKLRFGYDTNLFTVVQGEMRVPEEALKHEKFTIQLQLSQKSSESELSKSASAKSIDSKVADAATEVQHKTTEALKSEEKAMDISAMPRGTPLYGQPSWWGDDEVDEKRAFKTNGKPEEKNHEAGTSGCGIDAKQVEEQSAAANEEVLFPFCREPSYFEIPTKEFQQPSQITESTIHEIPTKDTPSSHITGAGHASFTIEFDDSTPGKVTIRDHVTKFTSDQRHKSKKSSPGTQDLLGIQTGMMAPENKVADWLAQNNPPQMLWERTEEDSKSIKSDVPVYLKRLKGNKHDDGTQSDSENAGAHRRCSKRATLEEHLRRHHSEHKKLQKVQATEKHQDQAVTSSAHHRGGHGVPHGKLLKQKSEEPSVSIPFLQTALLRSSGSLGHRPSQEMDKMLKNQATSATSEKDNDDDQSDKGTYTIELENPNSEEVEARKMIDKVFGVDDNQDYNRPVINEKHKDLIKDWALSSAAAVMEERKPLTTSGFHHSEEGTSSSGSKRWVSQWASLAANHTRHDQEERIMEFSAPLPLENETEISESGMTVRSTGSATSLASQGERRRRTLPQLPNEEKSLESHRAKVVTQRSEIGEKQDTELQEKETPTQVYQKDKQDADRPLSKMNRAVNGETLKTGGDNKTLLHLGSSAPGKEKSETDKETSLVKQTLAKLQQQEQREEAQWTPTKLSSKNVSGQTDKCREETFKQESQPPEKNSGHSTSKGDRVAQSESKRRKAEEILKSQTPKGGDKKESSKSLVRQGSFTIEKPSPNIPIELIPHINKQTSSTPSSLALTSASRIRERSESLDPDSSMDTTLILKDTEAVMAFLEAKLREDNKTDEGPDTPSYNRDNSISPESDVDTASTISLVTGETERKSTQKRKSFTSLYKDRCSTGSPSKDVTKSSSSGAREKMEKKTKSRSTDVGSRADGRKFVQSSGRIRQPSVDLTDDDQTSSVPHSAISDIMSSDQETYSCKPHGRTPLTSADEHVHSKLEGSKVTKSKTSPVVSGSSSKSTTLPRPRPTRTSLLRRARLGEASDSELADADKASVASEVSTTSSTSKPPTGRRNISRIDLLAQPRRTRLGSLSARSDSEATISRSSASSRTAEAIIRSGARLVPSDKFSPRIRANSISRLSDSKVKSMTSAHGSASVNSRWRRFPTDYASTSEDEFGSNRNSPKHTRLRTSPALKTTRLQSAGSAMPTSSSFKHRIKEQEDYIRDWTAHREEIARISQDLALIAREINDVAGEIDSVTSSGTAPSTTVSTAATTPGSAIDTREELVDRVFDESLNFRKIPPLVHSKTPEGNNGRSGDPRPQAAEPPDHLTITRRRTWSRDEVMGDNLLLSSVFQFSKKIRQSIDKTAGKIRILFKDKDRNWDDIESKLRAESEVPIVKTSSMEISSILQELKRVEKQLQAINAMIDPDGTLEALNNMGFPSAMLPSPPKQKSSPVNNHHSPGQTPTLGQPEARALHPAAVSAAAEFENAESEADFSIHFNRFNPDGEEEDVTVQE

SEQ ID NO: 320 - protein, 2116 aa, Homo sapiens
MSGFRLGDHVWLEPPSTHKTGVAIGGIIKEAKPGKVLVEDDEGKEHWIRAEDFGVLSPMHPNSVQGVDDMIRLGDLNEAGMVHNLLIRYQQHKIYTYTGSILVAVNPFQVLPLYTLEQVQLYYSRHMGELPPHVFAIANNCYFSMKRNKRDQCCIISGESGAGKTETTKLILQFLATISGQHSWIEQQVLEANPILEAFGNAKTIRNDNSSRFGKYIDIYFNPSGVIEGARIEQFLLEKSRVCRQAPEERNYHIFYCMLMGVSAEDKQLLSLGTPSEYHYLTMGNCTSCEGLNDAKDYAHIRSAMKILQFSDSESWDVIKLLAAILHLGNVGFMASVFENLDASDVMETPAFPTVMKLLEVQHQELRDCLIKHTILIRGEFVTRSLNIAQAADRRDAFVKGIYGHLFLWIVKKINAAIFTPPAQDPKNVRRAIGLLDIFGFENFENNSFEQLCINFANEHLQQFFVQHVFTMEQEEYRSENISWDYIHYTDNRPTLDLLALKPMSIISLLDEESRFPQGTDLTMLQKLNSVHANNKAFLQPKNIHDARFGIAHFAGEVYYQAEGFLEKNRDVLSTDILTLVYSSKNKFLREIFNLELAETKLGHGTIRQAKAGNHLFKSADSNKRPSTLGSQFKQSLDQLMKILTNCQPYFIRCIKPNEYKKPLLFDRELCLRQLRYSGMMETVHIRKSGFPIRYTFEEFSQRFGVLLPNAMRMQLQGKLRQMTLGITDVWLRTDKDWKAGKTKIFLRDHQDTLLEVQRSQVLDRAALSIQKVLRGYRYRKEFLRQRRAAVTLQAWWRGYCNRRNFKLILVGFERLQAIARSQPLARQYQAMRQRTVQLQALCRGYLVRQQVQAKRRAVVVIQAHARGMAARRNFQQRKANAPLVIPAEGQKSQGALPAKKRRSIYDTVTDTEMVEKVFGFLPAMIGGQEGQASPHFEDLESKTQKLLEVDLDTVPMAEEPEEDVDGLAEYTFPKFAVTYFQKSASHTHIRRPLRYPLLYHEDDTDCLAALVIWNVILRFMGDLPEPVLYARSSQQGSSVMRQIHDTLGREHGAQVPQHSRSAQVASQLNIGEEALEPDGLGADRPMSNLEKVHFIVGYAILRPSLRDEIYCQICKQLSENFKTSSLARGWILLSLCLGCFPPSERFMKYLLNFIGQGPATYGPFCAERLRRTYANGVRAEPPTWLELQAVKSKKHIPIQVILATGESLTVPVDSASTSREMCMHIAHKQGLSDHLGFSLQVAVYDKFWSLGSGRDHMMDAIARCEQMAQERGESQRQSPWRIYFRKEFFTPWHDSREDPVSTELIYRQVLRGVWSGEYSFEKEEELVELLARHCYVQLGASAESKAVQELLPSCIPHKLYRTKPPDRWASLVTAACAKAPYTQKQVTPLAVREQVVDAARLQWPLLFSRLFEVITLSGPRLPKTQLILAVNWKGLCFLDQQEKMLLELSFPEVMGLATNREAQGGQRLLLSTMHEEYEFVSPSSVAIAELVALFLEGLKERSIFAMALQDRKATDDTTLLAFKKGDLLVLTKKQGLLASENWTLGQNDRTGKTGLVPMACLYTIPTVTKPSAQLLSLLAMSPEKRKLAAQEGQFTEPRPEEPPKEKLHTLEEFSYEFFRAPEKDMVSMAVLPLARARGHLWAYSCEPLRQPLLKRVHANVDLWDIACQIFVAILRYMGDYPSRQAWPTLELTDQIFTLALQHPALQDEVYCQILKQLTHNSNRHSEERGWQLLWLCTGLFPPSKGLLPHAQKFIDTRRGKLLAPDCSRRIQKVLRTGPRKQPPHQVEVEAAEQNVSRICHKIYFPNDTSEMLEVVANTRVRDVCDSIATRLQLASWEGCSLFIKISDKVISQKEGDFFFDSLREVSDWVKKNKPQKEGAPVTLPYQVYFMRKLWLNISPGKDVNADTILHYHQELPKYLRGFHKCSREDAIHLAGLIYKAQFNNDRSQLASVPKILRELVPENLTRLMSSEEWKKSILLAYDKHKDKTVEEAKVAFLKWICRWPTFGSAFFEVKQTSEPSYPDVILIAINRHGVLLIHPKTKDLLTTYPFTKISSWSSGSTYFHMALGSLGRGSRLLCETSLGYKMDDLLTSYVQQLLSAMNKQRGSKAPALAST

SEQ ID NO: 321 - protein, 4242 aa, Homo sapiens
MMPAQYALTSSLVLLVLLSTARAGPFSSRSNVTLPAPRPPPQPGGHTVGAGVGSPSSQLYEHTVEGGEKQVVFTHRINLPPSTGCGCPPGTEPPVLASEVQALRVRLEILEELVKGLKEQCTGGCCPASAQAGTGQTDVRTLCSLHGVFDLSRCTCSCEPGWGGPTCSDPTDAEIPPSSPPSASGSCPDDCNDQGRCVRGRCVCFPGYTGPSCGWPSCPGDCQGRGRCVQGVCVCRAGFSGPDCSQRSCPRGCSQRGRCEGGRCVCDPGYTGDDCGMRSCPRGCSQRGRCENGRCVCNPGYTGEDCGVRSCPRGCSQRGRCKDGRCVCDPGYTGEDCGTRSCPWDCGEGGRCVDGRCVCWPGYTGEDCSTRTCPRDCRGRGRCEDGECICDTGYSGDDCGVRSCPGDCNQRGRCEDGRCVCWPGYTGTDCGSRACPRDCRGRGRCENGVCVCNAGYSGEDCGVRSCPGDCRGRGRCESGRCMCWPGYTGRDCGTRACPGDCRGRGRCVDGRCVCNPGFTGEDCGSRRCPGDCRGHGLCEDGVCVCDAGYSGEDCSTRSCPGGCRGRGQCLDGRCVCEDGYSGEDCGVRQCPNDCSQHGVCQDGVCICWEGYVSEDCSIRTCPSNCHGRGRCEEGRCLCDPGYTGPTCATRMCPADCRGRGRCVQGVCLCHVGYGGEDCGQEEPPASACPGGCGPRELCRAGQCVCVEGFRGPDCAIQTCPGDCRGRGECHDGSCVCKDGYAGEDCGEEVPTIEGMRMHLLEETTVRTEWTPAPGPVDAYEIQFIPTTEGASPPFTARVPSSASAYDQRGLAPGQEYQVTVRALRGTSWGLPASKTITTMIDGPQDLRVVAVTPTTLELGWLRPQAEVDRFVVSYVSAGNQRVRLEVPPEADGTLLTDLMPGVEYVVTVTAERGRAVSYPASVRANTGSSPLGLLGTTDEPPPSGPSTTQGAQAPLLQQRPQELGELRVLGRDETGRLRVVWTAQPDTFAYFQLRMRVPEGPGAHEEVLPGDVRQALVPPPPPGTPYELSLHGVPPGGKPSDPIIYQGIMDKDEEKPGKSSGPPRLGELTVTDRTSDSLLLRWTVPEGEFDSFVIQYKDRDGQPQVVPVEGPQRSAVITSLDPGRKYKFVLYGFVGKKRHGPLVAEAKILPQSDPSPGTPPHLGNLWVTDPTPDSLHLSWTVPEGQFDTFMVQYRDRDGRPQVVPVEGPERSFVVSSLDPDHKYRFTLFGIANKKRYGPLTADGTTAPERKEEPPRPEFLEQPLLGELTVTGVTPDSLRLSWTVAQGPFDSFMVQYKDAQGQPQAVPVAGDENEVTVPGLDPDRKYKMNLYGLRGRQRVGPESVVAKTAPQEDVDETPSPTELGTEAPESPEEPLLGELTVTGSSPDSLSLFWTVPQGSFDSFTVQYKDRDGRPRAVRVGGKESEVTVGGLEPGHKYKMHLYGLHEGQRVGPVSAVGVTAPQQEETPPATESPLEPRLGELTVTDVTPNSVGLSWTVPEGQFDSFIVQYKDKDGQPQVVPVAADQREVTVYNLEPERKYKMNMYGLHDGQRMGPLSVVIVTAPLPPAPATEASKPPLEPRLGELTVTDITPDSVGLSWTVPEGEFDSFVVQYKDRDGQPQVVPVAADQREVTIPDLEPSRKYKFLLFGIQDGKRRSPVSVEAKTVARGDASPGAPPRLGELWVTDPTPDSLRLSWTVPEGQFDSFVVQFKDKDGPQVVPVEGHERSVTVTPLDAGRKYRFLLYGLLGKKRHGPLTADGTTEARSAMDDTGTKRPPKPRLGEELQVTTVTQNSVGLSWTVPEGQFDSFVVQYKDRDGQPQVVPVEGSLREVSVPGLDPAHRYKLLLYGLHHGKRVGPISAVAITAGREETETETTAPTPPAPEPHLGELTVEEATSHTLHLSWMVTEGEFDSFEIQYTDRDGQLQMVRIGGDRNDITLSGLESDHRYLVTLYGFSDGKHVGPVHVEALTVPEEEKPSEPPTATPEPPIKPRLGELTVTDATPDSLSLSWTVPEGQFDHFLVQYRNGDGQPKAVRVPGHEEGVTISGLEPDHKYKMNLYGFHGGQRMGPVSVVGVTAAEEETPSPTEPSMEAPEPAEEPLLGELTVTGSSPDSLSLSWTVPQGRFDSFTVQYKDRDGRPQVVRVGGEESEVTVGGLEPGRKYKMHLYGLHEGRRVGPVSAVGVTAPEEESPDAPLAKLRLGQMTVRDITSDSLSLSWTVPEGQFDHFLVQFKNGDGQPKAVRVPGHEDGVTISGLEPDHKYKMNLYGFHGGQRVGPVSAVGLTAPGKDEEMAPASTEPPTPEPPIKPRLEELTVTDATPDSLSLSWTVPEGQFDHFLVQYKNGDGQPKATRVPGHEDRVTISGLEPDNKYKMNLYGFHGGQRVGPVSAIGVTAAEEETPSPTEPSMEAPEPPEEPLLGELTVTGSSPDSLSLSWTVPQGRFDSFTVQYKDRDGRPQVVRVGGEESEVTVGGLEPGRKYKMHLYGLHEGRRVGPVSTVGVTAPQEDVDETPSPTEPGTEAPGPPEEPLLGELTVTGSSPDSLSLSWTVPQGRFDSFTVQYKDRDGRPQAVRVGGQESKVTVRGLEPGRKYKMHLYGLHEGRRLGPVSAVGVTEDEAETTQAVPTMTPEPPIKPRLGELTMTDATPDSLSLSWTVPEGQFDHFLVQYRNGDGQPKAVRVPGHEDGVTISGLEPDHKYKMNLYGFHGGQRVGPISVIGVTAAEEETPSPTELSTEAPEPPEEPLLGELTVTGSSPDSLSLSWTIPQGHFDSFTVQYKDRDGRPQVMRVRGEESEVTVGGLEPGRKYKMHLYGLHEGRRVGPVSTVGVTEDEAETTQAVPTTTPEPPNKPRLGELTVTDATPDSLSLSWMVPEGQFDHFLVQYRNGDGQPKVVRVPGHEDGVTISGLEPDHKYKMNLYGFHGGQRVGPISVIGVTAAEEETPAPTEPSTEAPEPPEEPLLGELTVTGSSPDSLSLSWTIPQGRFDSFTVQYKDRDGRPQVVRVRGEESEVTVGGLEPGCKYKMHLYGLHEGQRVGPVSAVGVTAPKDEAETTQAVPTMTPEPPIKPRLGELTVTDATPDSLSLSWMVPEGQFDHFLVQYRNGDGQPKAVRVPGHEDGVTISGLEPDHKYKMNLYGFHGGQRVGPVSAIGVTEEETPSPTEPSTEAPEAPEEPLLGELTVTGSSPDSLSLSWTVPQGRFDSFTVQYKDRDGQPQVVRVRGEESEVTVGGLEPGRKYKMHLYGLHEGQRVGPVSTVGITAPLPTPLPVEPRLGELAVAAVTSDSVGLSWTVAQGPFDSFLVQYRDAQGQPQAVPVSGDLRAVAVSGLDPARKYKFLLFGLQNGKRHGPVPVEARTAPDTKPSPRLGELTVTDATPDSVGLSWTVPEGEFDSFVVQYKDKDGRLQVVPVAANQREVTVQGLEPSRKYRFLLYGLSGRKRLGPISADSTTAPLEKELPPHLGELTVAEETSSSLRLSWTVAQGPFDSFVVQYRDTDGQPRAVPVAADQRTVTVEDLEPGKKYKFLLYGLLGGKRLGPVSALGMTAPEEDTPAPELAPEAPEPPEEPRLGVLTVTDTTPDSMRLSWSVAQGPFDSFVVQYEDTNGQPQALLVDGDQSKILISGLEPSTPYRFLLYGLHEGKRLGPLSAEGTTGLAPAGQTSEESRPRLSQLSVTDVTTSSLRLNWEAPPGAFDSFLLRFGVPSPSTLEPHPRPLLQRELMVPGTRHSAVLRDLRSGTLYSLTLYGLRGPHKADSIQGTARTLSPVLESPRDLQFSEIRETSAKVNWMPPPSRADSFKVSYQLADGGEPQSVQVDGQARTQKLQGLIPGARYEVTVVSVRGFEESEPLTGFLTTVPDGPTQLRALNLTEGFAVLHWKPPQNPVDTYDVQVTAPGAPPLQAETPGSAVDYPLHDLVLHTNYTATVRGLRGPNLTSPASITFTTGLEAPRDLEAKEVTPRTALLTWTEPPVRPAGYLLSFHTPGGQNQEILLPGGITSHQLLGLFPSTSYNARLQAMWGQSLLPPVSTSFTTGGLRIPFPRDCGEEMQNGAGASRTSTIFLNGNRERPLNVFCDMETDGGGWLVFQRRMDGQTDFWRDWEDYAHGFGNISGEFWLGNEALHSLTQAGDYSMRVDLRAGDEAVFAQYDSFHVDSAAEYYRLHLEGYHGTAGDSMSYHSGSVFSARDRDPNSLLISCAVSYRGAWWYRNCHYANLNGLYGSTVDHQGVSWYHWKGFEFSVPFTEMKLRPRNFRSPAGGG

SEQ ID NO: 322 - protein, 2873 aa, Homo sapiens
MSSPRLIPLWKDLKLLLNDTINKSKQPSEDPKNCLIVLSDRSQAVAWMKSKTEDMVEKRTFSMTERLPPIQSMVHAGSFHILVVYCGDLILRLFGDHFRAFKPLGKVPCRFNISCLCYDPEMKMLLSGILGAVVTWVIELGGTGLQIAHMVSMPGDELVQDIVLNGPSGSLLALCETVVRVLMHQGKGQLGEVKRFTSTSSGSSITCCFTCFDQGFLYAGNQAGEIQVWSLQQGHPLHSFQAHQSGVICIRSRPEAHTLLTAGSDSLIKEWNLTSGSLLRRLELGEELYRLQFIDSITFFCQTAHSFSLHRLPCFYSLFNVCGSAPQQLRRVCCGNNWFRILCTTEDGLLRFVSPVTGDLLVITWPFSILDQAVDWAYDPGKEELFVATGSSEVLVFDTTRCPCPAKYLLGTSPNSQDFVQCLAYGHFNLGRGLEGLIFSGHQSGVIRVLSQHSCARLEKFMHFGAVLALSTLSGGIFGGQGNSLLCSYGMDDYVHLSEAVLDGVKVQLRPLASILSSCHLTHLILLPKSVGAITETNCLRLWKFHDFLSSGSQNGLKFIETLPLHLCAITSFDVCLSLSLFVTGSADGSVRIWDFHGRLIGILDSSLHFGPVCFANDRGDLLVTFNQSLYLVSCLKLLPPALLTRLSFMSISDEVLEVPKPFIPSFFFSFETMFVPKYIYPGQAQQKLVGLEKLVNNRAIAFDHSVPHVIEEDEEGSPVLLRSSMHYSLQDMEDWMQVSKRYQCHYVLPPQLQLTSWDGLNPYQILRYYFGHGREWLFAPDCYIPNSVIRARLWPEGTPIYLQCNLHAPQRELEWDRSQEFFFWHSRVRAISNTEYPKNKEEDEHFLEMRLSKDVTYSVLTDGANRSWLGRKMSEITINSMIETMLNIMVHASLLKYQCCVGALGQIFASYQVSPALRSETARRLLNDTTNSNPLIRELAWEGLKRLGMITHLFAMPLAQGLMDKDERVRIKTLSLMAEIGIHSRTSLLQLTQKQETFREMQQQMIGEEPLDHLLGMRATDLQILSTQVEQRLNENLTLSHRDEKPAFSLDVSMPSELKSSLKPPTVSEESEVAIKPSKGQRRGQAGVKKHSQKWLRGLKKTKERDSKQMSTEPGLLEDESGTEAAPIEMEEASVYSQWSSSTSVIKLSKDVDSQEKDISKDHIALTLKRLQKIRDKRDKKATAQKLKKKHKKKGKEAKVINEETTPPVMEQPVTKKVKIQGRGASGISGRRSTAGDGSSWRDDLCRLMALRISGSQTKMSENLNAELVTFAQEMLVDRHPSWELFQEICPLLKKESKVLLEDLDWDVVPPEKKPIFIQEGAIREDMIQGVTQEVIRHKEVMPREEEQAQKKARDMLGLEETQVILKKGKKVIFLEPGNVTMGKEISKKEEKKTFQKSPKQGRKAVQKERKVGKIKREMTKEERDMSEEVEEMATLEEKVVKQEGKLVMIERTPSWQDWKKAWDEWKQVHGETRKSWKAWKEEWEKRLLQEEEKLHQAGEKLSPEEEMLQEDKKLKWEEWKQVWENMLSSKSKEQQYKDEEEVTLEEEVSREGEEKEQQVTEEQRHIQEEHKWARIHRKRARAEKKRAQEERKLAQEEEKLAQEERQLAQEERKLAQAYVKITQDDREMAQAEGKFAQKEETLAQRGEKLSQEAEKLAQKRKKLAKKWEKVAREEEKLAKKGGKLAEVKNILAQKVEELPQREQNLDWQEKELAQELEELEWDMEELSWKEEELNQEEGKLVEEKKKLAEEEEALAWQREKLSEEETKLAQEEELLIQEKEKLAQHKEKMPEEEERLGRKREQLIEKKMKLAQKRERWINSMEELTKNKMILYQKKNLAQEKKNLAQEKEKLAQRKENLLYNKERLTHSKKQLVQVKNKLGMFNKILAQVEEKLTQEKETVIKKKEKLAETEKKLVQVEDSLAKKQEKLAQEKMKLALEKAMVQGKKRLRGELDIAKEEKALNLEMKRLAEEKMRLVEGKETLSKGETPETSRQRKMTQVEQELFERKLSLEEKILLHEDRILAMEESEIAKGKLEFTRGQRIFVQGQRKLAKASRKLIKKRESLSKEPAKLNKILKALQKLTRDERKLTQEEIKMTKMKRALFVKERRLSIEQSKLDIKEWDFSEKRSELTKDEKKLARKQRKLANKMRRMINKEEKMTEEESKLARKHSEVILDDEEEGGIEEEEVIPFLKRRWRKRKEAKRGDKPKEKFSSQVDEVESEEHFSEEMESLLDELEKQESLSSEEEEEREEEEEREEEEVREEEEERKEEEEGEEKQVEKEEEEKKKKKKEKKKEEVQEKEEVFEEKEEIMSEEETESLSDEEEEEESCSLEEEVDREKEILKKEKQFKLQEQRRKSLRGRERVLSILRGVPHGKGRAIRLGVLKSPLKKLMSTALEMKEKTPVPVPEKQISWEDKKATVVEIPRKFLGTMDKEREVMGKYEPIPPHVLGTVLESQAQDLKTPFMSHILRRTVEAEELQHKPLGAWWKWFLQHPPLMGQTEVQLPLSQIPAKEQHADVSLSDVEWIRHVLERMEAGEQLSRDGFHRLCQLLKDLASKGNLEWLHLAKHEAIVYRHRQALESQDTRISSRQSMSPKYLKVIPPIKAKEKESWPKPLAVPTQKSPLATKRIPDPRAKNWHLLGEPYRSERAQQISIAHKEMEMQYFYPATRDIFPSAHASVEKQTLALMFQKDFWDFKDKRRFPKLPKLEKKTQPISKKKEELPLWETFVALYHVLRMLQQRYPKDSTAWMEQFYQLMDLYQLKSPRIQKLLQELLMREEPQPQEIIYEEALKATELVPGERLFCCLFCGSSHTPRSPQEFQGAVPLPWQNCVRTILPVGIARYGILELAWKSLPEADLHLTKALTHTVAPTL

SEQ ID NO: 323 - protein, 2025 aa, Homo sapiens
MDNFAEGDFTVADYALLEDCPHVDDCVFAAEFMSNDYVRVTQLYCDGVGVQYKDYIQSERNLEFDICSIWCSKPISVLQDYCDAIKINIFWPLLFQHQNSSVISRLHPCVDANNSRASEINLKKLQHLELMEDIVDLAKKVANDSFLIGGLLRIGCKIENKILAMEEALNWIKYAGDVTILTKLGSIDNCWPMLSIFFTEYKYHITKIVMEDCNLLEELKTQSCMDCIEEGELMKMKGNEEFSKERFDIAIIYYTRAIEYRPENYLLYGNRALCFLRTGQFRNALGDGKRATILKNTWPKGHYRYCDALSMLGEYDWALQANIKAQKLCKNDPEGIKDLIQQHVKLQKQIEDLQGRTANKDPIKAFYENRAYTPRSLSAPIFTTSLNFVEKERDFRKINHEMANGGNQNLKVADEALKVDDCDCHPEFSPPSSQPPKHKGKQKSRNNESEKFSSSSPLTLPADLKNILEKQFSKSSRAAHQDFANIMKMLRSLIQDGYMALLEQRCRSAAQAFTELLNGLDPQKIKQLNLAMINYVLVVYGLAISLLGIGQPEELSEAENQFKRIIEHYPSEGLDCLAYCGIGKVYLKKNRFLEALNHFEKARTLIYRLPGVLTWPTSNVIIEESQPQKIKMLLEKFVEECKFPPVPDAICCYQKCHGYSKIQIYITDPDFKGFIRISCCQYCKIEFHMNCWKKLKTTTFNDKIDKDFLQGICLTPDCEGVISKIIIFSSGGEVKCEFEHKVIKEKVPPRPILKQKCSSLEKLRLKEDKKLKRKIQKKEAKKLAQERMEEDLRESNPPKNEEQKETVDNVQRCQFLDDRILQCIKQYADKIKSGIQNTAMLLKELLSWKVLSTEDYTTCFSSRNFLNEAVDYVIRHLIQENNRVKTRIFLHVLSELKEVEPKLAAWIQKLNSFGLDATGTFFSRYGASLKLLDFSIMTFLWNEKYGHKLDSIEGKQLDYFSEPASLKEARCLIWLLEEHRDKFPALHSALDEFFDIMDSRCTVLRKQDSGEAPFSSTKVKNKSKKKKPKDSKPMLVGSGTTSVTSNNEIITSSEDHSNRNSDSAGPFAVPDHLRQDVEEFEALYDQHSNEYVVRNKKLWDMNPKQKCSTLYDYFSQFLEEHGPLDMSNKMFSAEYEFFPEETRQILEKAGGLKPFLLGCPRFVVIDNCIALKKVASRLKKKRKKKNIKTKVEEISKAGEYVRVKLQLNPAAREFKPDVKSKPVSDSSSAPAFENVKPKPVSANSPKPACEDVKAKPVSDNSSRQVSEDGQPKGVSSNSPKPGSEDANYKRVSCNSPKPVLEDVKPTYWAQSHLVTGYCTYLPFQRFDITQTPPAYINVLPGLPQYTSIYTPLASLSPEYQLPRSVPVVPSFVANDRADKNAAAYFEGHHLNAENVAGHQIASETQILEGSLGISVKSHCSTGDAHTVLSESNRNDEHCGNSNNKCEVIPESTSAVTNIPHVQMVAIQVSWNIIHQEVNTEPYNPFEERQGEISRIEKEHQVLQDQLQEVYENYEQIKLKGLEETRDLEEKLKRHLEENKISKTELDWFLQDLEREIKKWQQEKKEIQERLKSLKKKIKKVSNASEMYTQKNDGKEKEHELHLDQSLEISNTLTNEKMKIEEYIKKGKEDYEESHQRAVAAEVSVLENWKESEVYKLQIMESQAEAFLKKLGLISRDPAAYPDMESDIRSWELFLSNVTKEIEKAKSQFEEQIKAIKNGSRLSELSKVQISELSFPACNTVHPELLPESSGDDGQGLVTSASDVTGNHAALHRDPSVFSAGDSPGEAPSALLPGPPPGQPEATQLTGPKRAGQAALSERSPVADRKQPVPPGRAARSSQSPKKPFNSIIEHLSVVFPCYNSTELAGFIKKVRSKNKNSLSGLSIDEIVQRVTEHILDEQKKKKPNPGKDKRTYEPSSATPVTRSSQGSPSVVVAPSPKTKGQKAEDVPVRIALGASSCEICHEVFKSKNVRVLKCGHKYHKGCFKQWLKGQSACPACQGRDLLTEESPSGRGWPSQNQELPSCSSR

SEQ ID NO: 324 - protein, 2624 aa, Homo sapiens
MFRRARLSVKPNVRPGVGARGSTASNPQRGRESPRPPDPATDSASKPAEPTDVPTVDFGGAEPQEKAPRSSTEKTGGDNDVEESSRSSSTVSQRRKRISSTSSLVKSSVSVPSESHPLSTINQEAPQPTATSTKEKQPCSDRYRIYKAQKLREMLKEELRKEKKQWKNKYAINESQRPPDRSKMTMRDFIYYLPDNNPMTSSLEQEKKTEKPSTPVQTREQEGKSTPNAEDNEMEEETDDGPLLVPRVKVAEDGSIILDEESLTVEVLRTKGPCVVEENDPIFERGSTTTYSSFRKNYYSKPWSNKETDMFFLAISMVGTDFSMIGQLFPHRARIEIKNKFKREEKTNGWRIDKAFQEKRPFDFDFFAHLLQKVLAEEEKRKQKSVKNHSLKEKKSTKPRKNVKVKKVACEGVNNDPDESMSSRISDTERSQKDAQTVEEESLTLSREDAEQVALEVDLNQKKRRRKKQDGANELGVNNLLENATVQAGPSKGEKHKNKCQAIRPELKEGECSKEQMLSCTQNIDGIVGFASTEKVEKRTDPILSLSNQQDATSVATESSESSTSDLPSFEVGIRALCEVNNAEGSCIEERNVDLKNNSLEIDQTENVKPMLRGRFQRPKPNLSRAGKKSVLSQGKTESESKNSHSKTSVEKNHVEKDKMNTLDILRMETTERENPEAETVSVLGEKNCLQEGSQLKALRPVQVRGRLQKPKPNAGKAAERKEILISQEEIGANVEKNENESCADRDTPQHMEDQSRKDFEEEDVILQPEKNDSFQNVQPDEPKVLNECLSVQENNKANKLNQVPILRTRFQKPKPNIGRGTGRREISSKEEVLEKILVSGEMAAALRETVRLDTSPKEMVPAEINTKEMQSDLKETGRRAISPREKILDVIDDTIEMETGLKAMGREICLREKTPEVIDATEEIDKDLEEAGRREISPQKNGPEEVKPLGEVETDLKATGNESSPREKTPEVTDATEEIDKNLEETGRRKISPRENGPEEVKPVDEMETDLNATGRESSPREKTPEVIDATEEIDLEETEREVSPQENGLEEVKPLGEMETDLKATGRDSFPRGKTPEVIDAIEEIEIDLEETEREISPQENGLEEVKPLGEMQTDLKATGREISPREKTPEVIDATEEIDKDLEETGRREISPEENGPEEVKPVDEMETDLKTTGREGSSREKTREVIDAAEVIETDLEETEREISPQENGPEEVKPVGKMETDLKEIREEISQREKVLAEFSAIREKEIDLKETGKRDIPIMEKVSGKMAVVEEMEADLKETGKENFRERGSEEICVTEEKVAELKQTGKTDISPRENELEETSTSRQTDTHLMQSGSNDFSAVPSLDIQNISSEVLSMMHTPVEEKRNSEKEVSSHFSHFKISSQTHESDKTEVQGIQSPDVPEQFSDINLSKSLPQEQKPLEIKPAPFVRSRFKRPKPNLARAALKRETTESEKYIYEKKSETKKMETIVMQENNEQTDTLPSQHDEASLMISREKDTLGHRNEEAVILPCTQTERNLSPSNSCEPKEESQSAPVQKNDSVVSVGTNNVNTFQQEMKESVIQTARQVRGRLQRPRPNIRKTGQRQIVDKGEAKGIIKEGRTILPKDETEKKVLTVSNSQIETEIEVPSSAVPEHRMYENQSQVVLVENLHVNKTNETIRHENKPYVPSSAQMTRRKFQKAKPNLGRAHSKKEEPVLEKVTTDQSKEGKPEDHLLQKGASNTQLLLKEKAELLTSLEVSARKDCVGSKESALAKIDAELEEVGPSRRVGEETVGDNSPSSVVEEQYLNKLTSCPQPLNETSYSKIALDGKTTISSTSEYERNRGERRSHKKFKPNVTRGRGSKRVRGKTSKKEPRASKAMLVTLRASQEEDDDADDFESDYEEESYHLAPEEVNKAPVFVPVGLRSPEPVSAQIEETMEELEITVNVPDVGCIAVVEHELPNTDVTTEEMKQEENLSVPFEMTTSEHIQDEPGTNDGSTEAAITLLTMGDLVLQSEISSEQGDVGVCIIPHVHSKDKSHIPSSLDNVNHKIVHECQELSSPVITTSPASFEENKIVLEEQSSREEISLMEKVKENATPTRNTISKVTSNLRIRSRLAKPKPNLEKTLGTNRLDDYQEVSSLCVTKGAEMETQRETEKNASKATELENKNLGPVTTAENKDQSKLACVHGIKGTSISSEVNLTERNENQEESSQEVHMLSVAPVASSETGPCTLGLDRGLGENSVEEPQIKDSKGDSVLTLPVPEYTPTSIPEVQQENIINPQDLTVNLVANVPQDGEDEQAFILTLVEIPANAVEEFTDATAQFMPNPLLPAPILVKSVNTEERGDMSICLPATSVGQDAMGLSISGRDNSKKPPDNLDLVSRKRFQCRLDKNDHIPPAKKRSLTLRDDCQEYTTEVHSKELTNVFEETGESHKGQDIFLTSGSTLTTPEPQRQQVEAAFQSRGSRSPDACMDKNVPQLPQDEMIVSDKEERTDAAPKSQQMDSRTSSSKASLSRPGRRPLGFLSLICSKNSLESDEPMQVHSKKRLKPLIPGLRKKLKRSNPFNESQEKNRESSDLLPSPSVITTQSENISSSATQVSCDQPLLKEGYKSAQKRAPQGEATTVSEYFFNDIFIEVDETE

SEQ ID NO: 325 - protein, 2617 aa, Homo sapiens
MLTDSGGGGTSFEEDLDSVAPRSAPAGASEPPPPGGVGLGIRTVRLFGEAGPASGVGSSGGGGSGSGTGGGDAALDFKLAAAVLRTGGGGGASGSDEDEVSEVESFILDQEDLDNPVLKTTSEIFLSSTAEGADLRTVDPETQARLEALLEAAGIGKLSTADGKAFADPEVLRRLTSSVSCALDEAAAALTRMKAENSHNAGQVDTRSLAEACSDGDVNAVRKLLDEGRSVNEHTEEGESLLCLACSAGYYELAQVLLAMHANVEDRGNKGDITPLMAASSGGYLDIVKLLLLHDADVNSQSATGNTALTYACAGGFVDIVKVLLNEGANIEDHNENGHTPLMEAASAGHVEVARVLLDHGAGINTHSNEFKESALTLACYKGHLDMVRFLLEAGADQEHKTDEMHTALMEACMDGHVEVARLLLDSGAQVNMPADSFESPLTLAACGGHVELAALLIERGANLEEVNDEGYTPLMEAAREGHEEMVALLLAQGANINAQTEETQETALTLACCGGFSEVADFLIKAGADIELGCSTPLMEASQEGHLELVKYLLASGANVHATTATGDTALTYACENGHTDVADVLLQAGADLEHESEGGRTPLMKAARAGHLCTVQFLISKGANVNRATANNDHTVVSLACAGGHLAVVELLLAHGADPTHRLKDGSTMLIEAAKGGHTNVVSYLLDYPNNVLSVPTTDVSQLPPPSQDQSQVPRVPTHTLAMVVPPQEPDRTSQENSPALLGVQKGTSKQKSSSLQVADQDLLPSFHPYQPLECIVEETEGKLNELGQRISAIEKAQLKSLELIQGEPLNKDKIEELKKNREEQVQKKKKILKELQKVERQLQMKTQQQFTKEYLETKGQKDTVSLHQQCSHRGVFPEGEGDGSLPEDHFSELPQVDTILFKDNDVDDEQQSPPSAEQIDFVPVQPLSSPQCNFSSDLGSNGTNSLELQKVSGNQQIVGQPQIAITGHDQGLLVQEPDGLMVATPAQTLTDTLDDLIAAVSTRVPTGSNSSSQTTECLTPESCSQTTSNVASQSMPPVYPSVDIDAHTESNHDTALTLACAGGHEELVSVLIARDAKIEHRDKKGFTPLILAATAGHVGVVEILLDKGGDIEAQSERTKDTPLSLACSGGRQEVVDLLLARGANKEHRNVSDYTPLSLAASGGYVNIIKILLNAGAEINSRTGSKLGISPLMLAAMNGHVPAVKLLLDMGSDINAQIETNRNTALTLACFQGRAEVVSLLLDRKANVEHRAKTGLTPLMEAASGGYAEVGRVLLDKGADVNAPPVPSSRDTALTIAADKGHYKFCELLIHRGAHIDVRNKKGNTPLWLASNGGHFDVVQLLVQAGADVDAADNRKITPLMSAFRKGHVKVVQYLVKEVNQFPSDIECMRYIATITDKELLKKCHQCVETIVKAKDQQAAEANKNASILLKELDLEKSREESRKQALAAKREKRKEKRKKKKEEQKRKQEEDEENKPKENSELPEDEDEEENDEDVEQEVPIEPPSATTTTTIGISATSATFTNVFGKKRANVVTTPSTNRKNKKNKTKETPPTAHLILPEQHMSLAQQKADKNKINGEPRGGGAGGNSDSDNLDSTDCNSESSSGGKSQELNFVMDVNSSKYPSLLLHSQEEKTSTATSKTQTRLEGEVTPNSLSTSYKTVSLPLSSPNIKLNLTSPKRGQKREEGWKEVVRRSKKLSVPASVVSRIMGRGGCNITAIQDVTGAHIDVDKQKDKNGERMITIRGGTESTRYAVQLINALIQDPAKELEDLIPKNHIRTPASTKSIHANFSSGVGTTAASSKNAFPLGAPTLVTSQATTLSTFQPANKLNKNVPTNVRSSFPVSLPLAYPHPHFALLAAQTMQQIRHPRLPMAQFGGTFSPSPNTWGPFPVRPVNPGNTNSSPKHNNTSRLPNQNGTVLPSESAGLATASCPITVSSVVAASQQLCVTNTRTPSSVRKQLFACVPKTSPPATVISSVTSTCSSLPSVSSAPITSGQAPTTFLPASTSQAQLSSQKMESFSAVPPTKEKVSTQDQPMANLCTPSSTANSCSSSASNTPGAPETHPSSSPTPTSSNTQEEAQPSSVSDLSPMSMPFASNSEPAPLTLTSPRMVAADNQDTSNLPQLAVPAPRVSHRMQPRGSFYSMVPNATIHQDPQSIFVTNPVTLTPPQGPPAAVQLSSAVNIMNGSQMHINPANKSLPPTFGPATLFNHFSSLFDSSQVPANQGWGDGPLSSRVATDASFTVQSAFLGNSVLGHLENMHPDNSKAPGFRPPSQRVSTSPVGLPSIDPSGSSPSSSSAPLASFSGIPGTRVFLQGPAPVGTPSFNRQHFSPHPWTSASNSSTSAPPTLGQPKGVSASQDRKIPPPIGTERLARIRQGGSVAQAPAGTSFVAPVGHSGIWSFGVNAVSEGLSGWSQSVMGNHPMHQQLSDPSTFSQHQPMERDDSGMVAPSNIFHQPMASGFVDFSKGLPISMYGGTIIPSHPQLADVPGGPLFNGLHNPDPAWNPMIKVIQNSTECTDAQQASLLPSVPALKGEIPSPQLTRPKKRIGRPMVASPNQRHQDHLRPKVPAGVQELTHCPDTPLLPPSDSRGHNSSNSPSLQAGGAEGAGDRGRDTR

SEQ ID NO: 326 - protein, 1978 aa, Homo sapiens
MSRPRFNPRGDFPLQRPRAPNPSGMRPPGPFMRPGSMGLPRFYPAGRARGIPHRFAGHESYQNMGPQRMNVQVTQHRTDPRLTKEKLDFHEAQQKKGKPHGSRWDDEPHISASVAVKQSSVTQVTEQSPKVQSRYTKESASSILASFGLSNEDLEELSRYPDEQLTPENMPLILRDIRMRKMGRRLPNLPSQSRNKETLGSEAVSSNVIDYGHASKYGYTEDPLEVRIYDPEIPTDEVENEFQSQQNISASVPNPNVICNSMFPVEDVFRQMDFPGESSNNRSFFSVESGTKMSGLHISGGQSVLEPIKSVNQSINQTVSQTMSQSLIPPSMNQQPFSSELISSVSQQERIPHEPVINSSNVHVGSRGSKKNYQSQADIPIRSPFGIVKASWLPKFSHADAQKMKRLPTPSMMNDYYAASPRIFPHLCSLCNVECSHLKDWIQHQNTSTHIESCRQLRQQYPDWNPEILPSRRNEGNRKENETPRRRSHSPSPRRSRRSSSSHRFRRSRSPMHYMYRPRSRSPRICHRFISRYRSRSRSRSPYRIRNPFRGSPKCFRSVSPERMSRRSVRSSDRKKALEDVVQRSGHGTEFNKQKHLEAADKGHSPAQKPKTSSGTKPSVKPTSATKSDSNLGGHSIRCKSKNLEDDTLSECKQVSDKAVSLQRKLRKEQSLHYGSVLLITELPEDGCTEEDVRKLFQPFGKVNDVLIVPYRKEAYLEMEFKEAITAIMKYIETTPLTIKGKSVKICVPGKKKAQNKEVKKKTLESKKVSASTLKRDADASKAVEIVTSTSAAKTGQAKASVAKVNKSTGKSASSVKSVVTVAVKGNKASIKTAKSGGKKSLEAKKTGNVKNKDSNKPVTIPENSEIKTSIEVKATENCAKEAISDAALEATENEPLNKETEEMCVMLVSNLPNKGYSVEEVYDLAKPFGGLKDILILSSHKKAYIEINRKAAESMVKFYTCFPVLMDGNQLSISMAPENMNIKDEEAIFITLVKENDPEANIDTIYDRFVHLDNLPEDGLQCVLCVGLQFGKVDHHVFISNRNKAILQLDSPESAQSMYSFLKQNPQNIGDHMLTCSLSPKIDLPEVQIEHDPELEKESPGLKNSPIDESEVQTATDSPSVKPNELEEESTPSIQTETLVQQEEPCEEEAEKATCDSDFAVETLELETQGEEVKEEIPLVASASVSIEQFTENAEECALNQQMFNSDLEKKGAEIINPKTALLPSDSVFAEERNLKGILEESPSEAEDFISGITQTMVEAVAEVEKNETVSEILPSTCIVTLVPGIPTGDEKTVDKKNISEKKGNMDEKEEKEFNTKETRMDLQIGTEKAEKNEGRMDAEKVEKMAAMKEKPAENTLFKAYPNKGVGQANKPDETSKTSILAVSDVSSSKPSIKAVIVSSPKAKATVSKTENQKSFPKSVPRDQINAEKKLSAKEFGLLKPTSARSGLAESSSKFKPTQSSLTRGGSGRISALQGKLSKLDYRDITKQSQETEARPSIMKRDDSNNKTLAEQNTKNPKSTTGRSSKSKEEPLFPFNLDEFVTVDEVIEEVNPSQAKQNPLKGKRKETLKNVPFSELNLKKKKGKTSTPRGVEGELSFVTLDEIGEEEDAAAHLAQALVTVDEVIDEEELNMEEMVKNSNSLFTLDELIDQDDCISHSEPKDVTVLSVAEEQDLLKQERLVTVDEIGEVEELPLNESADITFATLNTKGNEGDTVRDSIGFISSQVPEDPSTLVTVDEIQDDSSDLHLVTLDEVTEEDEDSLADFNNLKEELNFVTVDEVGEEEDGDNDLKVELAQSKNDHPTDKKGNRKKRAVDTKKTKLESLSQVGPVNENVMEEDLKTMIERHLTAKTPTKRVRIGKTLPSEKAVVTEPAKGEEAFQMSEVDEESGLKDSEPERKRKKTEDSSSGKSVASDVPEELDFLVPKAGFFCPICSLFYSGEKAMTNHCKSTRHKQNTEKFMAKQRKEKEQNEAEERSSR

SEQ ID NO: 327 - protein, 1690 aa, Homo sapiens
MWSLHIVLMRCSFRLTKSLATGPWSLILILFSVQYVYGSGKKYIGPCGGRDCSVCHCVPEKGSRGPPGPPGPQGPIGPLGAPGPIGLSGEKGMRGDRGPPGAAGDKGDKGPTGVPGFPGLDGIPGHPGPPGPRGKPGMSGHNGSRGDPGFPGGRGALGPGGPLGHPGEKGEKGNSVFILGAVKGIQGDRGDPGLPGLPGSWGAGGPAGPTGYPGEPGLVGPPGQPGRPGLKGNPGVGVKGQMGDPGEVGQQGSPGPTLLVEPPDFCLYKGEKGIKGIPGMVGLPGPPGRKGESGIGAKGEKGIPGFPGPRGDPGSYGSPGFPGLKGELGLVGDPGLFGLIGPKGDPGNRGHPGPPGVLVTPPLPLKGPPGDPGFPGRYGETGDVGPPGPPGLLGRPGEACAGMIGPPGPQGFPGLPGLPGEAGIPGRPDSAPGKPGKPGSPGLPGAPGLQGLPGSSVIYCSVGNPGPQGIKGKVGPPGGRGPKGEKGNEGLCACEPGPMGPPGPPGLPGRQGSKGDLGLPGWLGTKGDPGPPGAEGPPGLPGKHGASGPPGNKGAKGDMVVSRVKGHKGERGPDGPPGFPGQPGSHGRDGHAGEKGDPGPPGDHEDATPGGKGFPGPLGPPGKAGPVGPPGLGFPGPPGERGHPGVPGHPGVRGPDGLKGQKGDTISCNVTYPGRHGPPGFDGPPGPKGFPGPQGAPGLSGSDGHKGRPGTPGTAEIPGPPGFRGDMGDPGFGGEKGSSPVGPPGPPGSPGVNGQKGIPGDPAFGHLGPPGKRGLSGVPGIKGPRGDPGCPGAEGPAGIPGFLGLKGPKGREGHAGFPGVPGPPGHSCERGAPGIPGQPGLPGYPGSPGAPGGKGQPGDVGPPGPAGMKGLPGLPGRPGAHGPPGLPGIPGPFGDDGLPGPPGPKGPRGLPGFPGFPGERGKPGAEGCPGAKGEPGEKGMSGLPGDRGLRGAKGAIGPPGDEGEMAIISQKGTPGEPGPPGDDGFPGERGDKGTPGMQGRRGEPGRYGPPGFHRGEPGEKGQPGPPGPPGPPGSTGLRGFIGFPGLPGDQGEPGSPGPPGFSGIDGARGPKGNKGDPASHFGPPGPKGEPGSPGCPGHFGASGEQGLPGIQGPRGSPGRPGPPGSSGPPGCPGDHGMPGLRGQPGEMGDPGPRGLQGDPGIPGPPGIKGPSGSPGLNGLHGLKGQKGTKGASGLHDVGPPGPVGIPGLKGERGDPGSPGISPPGPRGKKGPPGPPGSSGPPGPAGATGRAPKDIPDPGPPGDQGPPGPDGPRGAPGPPGLPGSVDLLRGEPGDCGLPGPPGPPGPPGPPGYKGFPGCDGKDGQKGPVGFPGPQGPHGFPGPPGEKGLPGPPGRKGPTGLPGPRGEPGPPADVDDCPRIPGLPGAPGMRGPEGAMGLPGMRGPSGPGCKGEPGLDGRRGVDGVPGSPGPPGRKGDTGEDGYPGGPGPPGPIGDPGPKGFGPGYLGGFLLVLHSQTDQEPTCPLGMPRLWTGYSLLYLEGQEKAHNQDLGLAGSCLPVFSTLPFAYCNIHQVCHYAQRNDRSYWLASAAPLPMMPLSEEAIRPYVSRCAVCEAPAQAVAVHSQDQSIPPCPQTWRSLWIGYSFLMHTGAGDQGGGQALMSPGSCLEDFRAAPFLECQGRQGTCHFFANKYSFWLTTVKADLQFSSAPAPDTLKESQAQRQKISRCQVCVKYS

SEQ ID NO: 328 - protein, 2925 aa, Homo sapiens
MGVLASALCWLLCVWLPWGEQAAESLRVQRLGERVVDSGRSGARGMRNVKGMRNGPAQTRVSSSSSHQEATLAMGDKATVVGGQQAEAPDSVAMSSWERRLHRAKCAPSYLFSCFNGGECVHPAFCDCRRFNATGPRCQMVYNAGPERDSICRAWGQHHVETFDGLYYYLSGKGSYTLVGRHEPEGQSFSIQVHNDPQCGSSPYTCSRAVSLFFVGEQEIHLAKEVTHGGMRVQLPHVMGSARLQQLAGYVIVRHQSAFTLAWDGASAVYIKMSPELLGWTHGLCGNNNADPKDDLVTSSGKLTDDVVEFVHSWQEQAPNQPPGPTTSSLPRPPCLQQNPGTMQGVYEQCEALLRPPFDACHAYVSPLPFTASCTSDLCQSMGDVATWCRALAEYARACAQAGRPLQGWRTQLRQCTVHCKEKAFTYNECIACCPASCHPRASCVDSEIACVDGCYCPNGLIFEDGGCVAPAECPCEFHGTLYPPGSVVKEDCNTCTCTSGKWECSTAVCPAECSVTGDIHFTTFDGRRYTFPATCQYILAKSRSSGTFTVTLQNAPCGLNQDGACVQSVSVILHQDPRRQVTLTQAGDVLLFDQYKIIPPYTDDAFEIRRLSSVFLRVRTNVGVRVLYDREGLRLYLQVDQRWVEDTVGLCGTFNGNTQDDFLSPVGVPESTPQLFGNSWKTLSACSPLVSGSPLDPCDVHLQAASYSVQACSVLTGEMFAPCSAFLSPVPYFEQCRRDACRCGQPCLCATLAHYAHLCRRHGLPVDFRARLPACALSCEASKEYSPCVAPCGRTCQDLASPEACGVDGGDDLSRDECVEGCACPPDTYLDTQADLCVPRNQCSCHFQGVDYPPGDSDIPSLGHCHCKDGVMSCDSRAPAAACPAGQVFVNCSDLHTDLELSRERTCEQQLLNLSVSARGPCLSGCACPQGLLRHGDACFLPEECPCTWKGKEYFPGDQVMSPCHTCVCQRGSFQCTLHPCASTCTAYGDRHYRTFDGLPFDFVGACKVHLVKSTSDVSFSVIVENVNCYSSGMICRKFISINVGNSLIVFDDDSGNPSPESFLDDKQEVHTWRVGFFTLVHFPQEHITLLWDQRTTVHVQAGPQWQGQLAGLCGNFDLKTINEMRTPENLELTNPQEFGSSWAAVECPDTLDPRDMCVLNPLREPFAKKECSILLSEVFEICHPVVDVTWFYSNCLTDTCGCSQGGDCECFCASVSAYAHQCCQHGVAVDWRTPRLCPYDCDFFNKVLGKGPYQLSSLAAGGALVGMKAVGDDIVLVRTEDVAPADIVSFLLTAALYKAKAHDPDVVSLEAADRPNFFLHVTANGSLELAKWQGRDTFQQHASFLLHRGTRQAGLVALESLAKPSSFLYVSGAVLALRLYEHTEVFRRGTLFRLLDAKPSGAAYPICEWRYDACASPCFQTCRDPRAASCRDVPRVEGCVPVCPTPQVLDEVTQRCVYLEDCVEPAVWVPTEALGNETLPPSQGLPTPSDEEPQLSQESPRTPTHRPALTPAAPLTTALNPPVTATEEPVVSPGPTQTTLQQPLELTASQLPAGPTESPASKGVTASLLAIPHTPESSSLPVALQTPTPGMVSGAMETTRVTVIFAGSPNITVSSRSPPAPRFPLMTKAVTVRGHGSLPVRTTPPQPSLTASPSSRPVASPGAISRSPTSSGSHKAVLTPAVTKVISRTGVPQPTQAQSASSPSTPLTVAGTAAEQVPVSPLATRSLEIVLSTEKGEAGHSQPMGSPASPQPHPLPSAPPRPAQHTTMATRSPALPPETPAAASLSTATDGLAATPFMSLESTRPSQLLSGLPPDTSLPLAKVGTSAPVATPGPKASVITTPLQPQATTLPAQTLSPVLPFTPAAMTQAHPPTHIAPPAAGTAPGLLLGATLPTSGVLPVAEGTASMVSVVPRKSTTGKVAILSKQVSLPTSMYGSAEGGPTELTPATSHPLTPLVAEPEGAQAGTALPVPTSYALSRVSARTAPQDSMLVLLPQLAEAHGTSAGPHLAAEPVDEATTEPSGRSAPALSIVEGLAEALATTTEANTSTTCVPIAEQDCVRHICLEGQLIRVNQSQHCPQGAAPPRCGILGLAVRVGGDRCCPLWECACRCSIFPDLSFVTFDGSHVALFKEAIYILSQSPDEMLTVHVLDCKSANLGHLNWPPFCLVMLNMTHLAHQVTIDRFNRKVTVDLQPVWPPVSRYGFRIEDTGHMYMILTPSDIQIQWLHSSGLMIVEASKTSKAQGHGLCGICDGDAANDLTLKDGSVVGGAEDPAPFLDSWQVPSSLTSVGQTRFRPDSCATTDCSPCLRMVSNRTFSACHRFVPPESFCELWIRDTKYVQQPCVALTVYVAMCHKFHVCIEWRRSDYCPFLCSSDSTYQACVTACEPPKTCQDGILGPLDPEHCQVLGEGCVCSEGTILHRRHSALCIPEAKCACTDSMGVPRALGETWNSSLSGCCQHQCQAPDTIVPVDLGCPSPRPESCLRFGEVALLLPTKDPCCLGTVCVCNQTLCEGLAPTCRPGHRLLTHFQEDSCCPSYSCECDPDLCEAELVPSCRQDQILITGRLGDSCCTSYFCACGDCPDSIPECQEGEALTVHRNTTELCCPLYQCVCENFRCPQVQCGLGTALVEVWSPDRCCPYKSCECDCDTIPVPRCHLWEKSQLDEEFMHSVENVCGCAKYECVKAPVCLSRELGVMQPGQTVVELSADGVCHTSRCTTVLDPLTNFYQINTTSVLCDIHCEANQEYEHPRDLAACCGSCRNVSCLFTFPNGTTSLFLPGASWIADCARHHCSSTPLGAVLVRSPISCPPLNETECAKVGGSVVPSLEGCCRTCKEDGRSCKKVTIRMTIRKNECRSSTPVNLVSCDGRCPSASIYNYNINTYARFCKCCREVGLQRRSVQLFCATNATWVPYTVQEPTDCACQWS

SEQ ID NO: 329 - protein, 2701 aa, Homo sapiens
MAEEGAVAVCVRVRPLNSREESLGETAQVYWKTDNNVIYQVDGSKSFNFDRVFHGNETTKNVYEEIAAPIIDSAIQGYNGTIFAYGQTASGKTYTMMGSEDHLGVIPRAIHDIFQKIKKFPDREFLLRVSYMEIYNETITDLLCGTQKMKPLIIREDVNRNVYVADLTEEVVYTSEMALKWITKGEKSRHYGETKMNQRSSRSHTIFRMILESREKGEPSNCEGSVKVSHLNLVDLAGSERAAQTGAAGVRLKEGCNINRSLFILGQVIKKLSDGQVGGFINYRDSKLTRILQNSLGGNAKTRIICTITPVSFDETLTALQFASTAKYMKNTPYVNEVSTDEALLKRYRKEIMDLKKQLEEVSLETRAQAMEKDQLAQLLEEKDLLQKVQNEKIENLTRMLVTSSSLTLQQELKAKRKRRVTWCLGKINKMKNSNYADQFNIPTNITTKTHKLSINLLREIDESVCSESDVFSNTLDTLSEIEWNPATKLLNQENIESELNSLRADYDNLVLDYEQLRTEKEEMELKLKEKNDLDEFEALERKTKKDQEMQLIHEISNLKNLVKHAEVYNQDLENELSSKVELLREKEDQIKKLQEYIDSQKLENIKMDLSYSLESIEDPKQMKQTLFDAETVALDAKRESAFLRSENLELKEKMKELATTYKQMENDIQLYQSQLEAKKKMQVDLEKELQSAFNEITKLTSLIDGKVPKDLLCNLELEGKITDLQKELNKEVEENEALREEVILLSELKSLPSEVERLRKEIQDKSEELHIITSEKDKLFSEVVHKESRVQGLLEEIGKTKDDLATTQSNYKSTDQEFQNFKTLHMDFEQKYKMVLEENERMNQEIVNLSKEAQKFDSSLGALKTELSYKTQELQEKTREVQERLNEMEQLKEQLENRDSTLQTVEREKTLITEKLQQTLEEVKTLTQEKDDLKQLQESLQIERDQLKSDIHDTVNMNIDTQEQLRNALESLKQHQETINTLKSKISEEVSRNLHMEENTGETKDEFQQKMVGIDKKQDLEAKNTQTLTADVKDNEIIEQQRKIFSLIQEKNELQQMLESVIAEKEQLKTDLKENIEMTIENQEELRLLGDELKKQQEIVAQEKNHAIKKEGELSRTCDRLAEVEEKLKEKSQQLQEKQQQLLNVQEEMSEMQKKINEIENLKNELKNKELTLEHMETERLELAQKLNENYEEVKSITKERKVLKELQKSFETERDHLRGYIREIEATGLQTKEELKIAHIHLKEHQETIDELRRSVSEKTAQIINTQDLEKSHTKLQEEIPVLHEEQELLPNVKEVSETQETMNELELLTEQSTTKDSTTLARIEMERLRLNEKFQESQEEIKSLTKERDNLKTIKEALEVKHDQLKEHIRETLAKIQESQSKQEQSLNMKEKDNETTKIVSEMEQFKPKDSALLRIEIEMLGLSKRLQESHDEMKSVAKEKDDLQRLQEVLQSESDQLKENIKEIVAKHLETEEELKVAHCCLKEQEETINELRVNLSEKETEISTIQKQLEAINDKLQNKIQEIYEKEEQFNIKQISEVQEKVNELKQFKEHRKAKDSALQSIESKMLELTNRLQESQEEIQIMIKEKEEMKRVQEALQIERDQLKENTKEIVAKMKESQEKEYQFLKMTAVNETQEKMCEIEHLKEQFETQKLNLENIETENIRLTQILHENLEEMRSVTKERDDLRSVEETLKVERDQLKENLRETITRDLEKQEELKIVHMHLKEHQETIDKLRGIVSEKTNEISNMQKDLEHSNDALKAQDLKIQEELRIAHMHLKEQQETIDKLRGIVSEKTDKLSNMQKDLENSNAKLQEKIQELKANEHQLITLKKDVNETQKKVSEMEQLKKQIKDQSLTLSKLEIENLNLAQKLHENLEEMKSVMKERDNLRRVEETLKLERDQLKESLQETKARDLEIQQELKTARMLSKEHKETVDKLREKISEKTIQISDIQKDLDKSKDELQKKIQELQKKELQLLRVKEDVNMSHKKINEMEQLKKQFEAQNLSMQSVRMDNFQLTKKLHESLEEIRIVAKERDELRRIKESLKMERDQFIATLREMIARDRQNHQVKPEKRLLSDGQQHLTESLREKCSRIKELLKRYSEMDDHYECLNRLSLDLEKEIEFQKELSMRVKANLSLPYLQTKHIEKLFTANQRCSMEFHRIMKKLKYVLSYVTKIKEEQHESINKFEMDFIDEVEKQKELLIKIQHLQQDCDVPSRELRDLKLNQNMDLHIEEILKDFSESEFPSIKTEFQQVLSNRKEMTQFLEEWLNTRFDIEKLKNGIQKENDRICQVNNFFNNRIIAIMNESTEFEERSATISKEWEQDLKSLKEKNEKLFKNYQTLKTSLASGAQVNPTTQDNKNPHVTSRATQLTTEKIRELENSLHEAKESAMHKESKIIKMQKELEVTNDIIAKLQAKVHESNKCLEKTKETIQVLQDKVALGAKPYKEEIEDLKMKLVKIDLEKMKNAKEFEKEISATKATVEYQKEVIRLLRENLRRSQQAQDTSVISEHTDPQPSNKPLTCGGGSGIVQNTKALILKSEHIRLEKEISKLKQQNEQLIKQKNELLSNNQHLSNEVKTWKERTLKREAHKQVTCENSPKSPKVTGTASKKKQITPSQCKERNLQDPVPKESPKSCFFDSRSKSLPSPHPVRYFDNSSLGLCPEVQNAGAESVDSQPGPWHASSGKDVPECKTQ

SEQ ID NO: 330 - protein, 119 aa, Homo sapiens
EVQLLESGGGLVQPGGSLRLSCAASGFTFSSSAMSWVRQAPGKGLEWVAWKYENGNDKHYADSVNGRFTISRNDSKNTLYLLMNSLQAZBTALYYCARDAGPYVSPTFFAHYGQGTLVT

SEQ ID NO: 331 - protein, 2564 aa, Homo sapiens
MAQVPGEVDNMEGLPAPNNNPAARWESPDRGWEREQPAASTAAASLFECSRIKALADEREAVQKKTFTKWVNSHLARVGCHIGDLYVDLRDGFVLTRLLEVLSGEQLPRPTRGRMRIHSLENVDKALQFLKEQRVHLENVGSHDIVDGNHRLTLGLVWTIILRFQIQVIKIETEDNRETRSAKDALLLWCQMKTAGYPEVNIQNFTTSWRDGLAFNALIHRHRPDLVDFSKLTKSNANYNLQRAFRTAEQHLGLARLLDPEDVNMEAPDEKSIITYVVSFYHYFSKMKALAVEGKRIGKVLDQVLEVGKIIERYEELAAELLAWIHRTVGLISNQKFANSLSGVQQQLQAFTAYCTLEKPVKFQEKGNLEVLLFSIQSKLRACNRRLFVPREGCGIWDIDKAWGELEKAEHEREAALRAELIRQEKLELLAQRFDHKVAMRESWLNENQRLVSQDNFGYELPAVEAAMKKHEAIEADIAAYEERVQGVAELAQALAAEGYYDIRRVAAQRDSVLRQWALLTGLVGARRTRLEQNLALQKVFQEMVYMVDWMEEMQAQLLSRECGQHLVEADDLLQKHGLLEGDIAAQSERVEALNAAALRFSQLQGYQPCDPQVICNRVNHVHGCLAELQEQAARRRAELEASRSLWALLQELEEAESWARDKERLLEAAGGGGAAGAAGAAGTAGGAHDLSSTARLLAQHKILQGELGGRRALLQQALRCGEELVAAGGAVGPGADTVHLVGLAERAASARRRWQRLEEAAARRERRLQEARALHQFGADLDGLLDWLRDAYRLAAAGDFGHDEASSRRLARQHRALTGEVEAHRGPVSGLRRQLATLGGASGAGPLVVALQVRVVEAEQLFAEVTEVAALRRQWLRDALAVYRMFGEVHACELWIGEKEQWLLSMRVPDSLDDVEVVQHRFESLDQEMNSLMGRVLDVNHTVQELVEGGHPSSDEVRSCQDHLNSRWNRIVELVEQRKEEMSAVLLVENHVLEVAEVRAQVREKRRAVESAPRAGGALQWRLSGLEAALQALEPRQAALLEEAALLAERFPAQAARLHQGAEELGAEWGALASAAQACGEAVAAAGRLQRFLHDLDAFLDWLVRAQEAAGGSEGPLPNSLEEADALLARHAALKEEVDQREEDYARIVAASEALLAADGAELGPGLALDEWLPHLELGWHKLLGLWEARREALVQAHIYQLFLRDLRQALVVLRNQEMALSGAELPGTVESVEEALKQHRDFLTTMELSQQKMQVAVQAAEGLLRQGNIYGEQAQEAVTRLLEKNQENQLRAQQWMQKLHDQLELQHFLRDCHELDGWIHEKMLMARDGTREDNHKLHKRWLRHQAFMAELAQNKEWLEKIEREGQQLMQEKPELAASVRKKLGEIRQCWAELESTTQAKARQLFEASKADQLVQSFAELDKKLLHMESQLQDVDPGGDLATVNSQLKKLQSMESQVEEWYREVGELQAQTAALPLEPASKELVGERQNAVGERLVRLLEPLQERRRLLLASKELHQVAHDLDDELAWVQERLPLAMQTERGNGLQAVQQHIKKNQGLRREIQAHGPRLEEVLERAGALASLRSPEAEAVRRGLEQLQSAWAGLREAAERRQQVLDAAFQVEQYYFDVAEVEAWLGEQELLMMSEDKGKDEQSTLQLLKKHLQLEQGVENYEESIAQLSRQCRALLEMGHPDSEQISRRQSQVDRLYVALKELGEERRVALEQQYWLYQLSRQVSELEHWIAEKEVVAGSPELGQDFEHVSVLQEKFSEFASETGMAGRERLAAVNQMVDELIECGHTAAATMAEWKDGLNEAWAELLELMGTRAQLLAASRELHKFFSDARELQGQIEEKRRRLPRLTTPPEPRPSASSMQRTLRAFEHDLQLLVSQVRQLQEGAAQLRTVYAGEHAEAIASREQEVLQGWKELLSACEDARLHVSSTADALRFHSQVRDLLSWMDGIASQIGAADKPRDVSSVEVLMNYHQGLKTELEARVPELTTCQELGRSLLLNKSAMADEIQAQLDKLGTRKEEVSEKWDRHWEWLQQMLEVHQFAQEAVVADAWLTAQEPLLQSRELGSSVDEVEQLIRRHEAFRKAAAAWEERFSSLRRLTTIEKIKAEQSKQPPTPLLGRKFFGDPTELAAKAAPLLRPGGYERGLEPLARRASDTLSAEVRTRVGYVRQELKPERLQPRIDRLPEIPGRVEPAALPAAPEDAAETPATPAAAEQVRPRPERQESADRAEELPRRRRPERQESVDQSEEAARRRRPERQESAEHEAAHSLTLGRYEQMERRRERRERRLERQESSEQEMPIRGDLVKGKATLADIVEQLQEKEAGPGLPAGPSLPQPRELPPGRLPNGLELPERTPRPDRPRARDRPKPRRRPRPREGGEGGGSRRSRSAPAQGGSAPAPPPPPTHTVQHEGFLLRKRELDANRKSSNRSWVSLYCVLSKGELGFYKDSKGPASGSTHGGEPLLSLHKATSEVASDYKKKKHVFKLQTQDGSEFLLQAKDEEEMNGWLEAVASSVAEHAEIARWGQTLPTTSSTDEGNPKREGGDRRASGRRK

SEQ ID NO: 332 - protein, 3312 aa, Homo sapiens
MMARRPPWRGLGGRSTPILLLLLLSLFPLSQEELGGGGHQGWDPGLAATTGPRAHIGGGALALCPESSGVREDGGPGLGVREPIFVGLRGRRQSARNSRGPPEQPNEELGIEHGVQPLGSRERETGQGPGSVLYWRPEVSSCGRTGPLQRGSLSPGALSSGVPGSGNSSPLPSDFLIRHHGPKPVSSQRNAGTGSRKRVGTARCCGELWATGSKGQGERATTSGAERTAPRRNCLPGASGSGPELDSAPRTARTAPASGSAPRESRTAPEPAPKRMRSRGLFRCRFLPQRPGPRPPGLPARPEARKVTSANRARFRRAANRHPQFPQYNYQTLVPENEAAGTAVLRVVAQDPDAGEAGRLVYSLAALMNSRSLELFSIDPQSGLIRTAAALDRESMERHYLRVTAQDHGSPRLSATTMVAVTVADRNDHSPVFEQAQYRETLRENVEEGYPILQLRATDGDAPPNANLRYRFVGPPAARAAAAAAFEIDPRSGLISTSGRVDREHMESYELVVEASDQGQEPGPRSATVRVHITVLDENDNAPQFSEKRYVAQVREDVRPHTVVLRVTATDRDKDANGLVHYNIISGNSRGHFAIDSLTGEIQVVAPLDFEAEREYALRIRAQDAGRPPLSNNTGLASIQVVDINDHIPIFVSTPFQVSVLENAPLGHSVIHIQAVDADHGENARLEYSLTGVAPDTPFVINSATGWVSVSGPLDRESVEHYFFGVEARDHGSPPLSASASVTVTVLDVNDNRPEFTMKEYHLRLNEDAAVGTSVVSVTAVDRDANSAISYQITGGNTRNRFAISTQGGVGLVTLALPLDYKQERYFKLVLTASDRALHDHCYVHINITDANTHRPVFQSAHYSVSVNEDRPMGSTIVVISASDDDVGENARITYLLEDNLPQFRIDADSGAITLQAPLDYEDQVTYTLAITARDNGIPQKADTTYVEVMVNDVNDNAPQFVASHYTGLVSEDAPPFTSVLQISATDRDAHANGRVQYTFQNGEDGDGDFTIEPTSGIVRTVRRLDREAVSVYELTAYAVDRGVPPLRTPVSIQVMVQDVNDNAPVFPAEEFEVRVKENSIVGSVVAQITAVDPDEGPNAHIMYQIVEGNIPELFQMDIFSGELTALIDLDYEARQEYVIVVQATSAPLVSRATVHVRLVDQNDNSPVLNNFQILFNNYVSNRSDTFPSGIIGRIPAYDPDVSDHLFYSFERGNELQLLVVNQTSGELRLSRKLDNNRPLVASMLVTVTDGLHSVTAQCVLRVVIITEELLANSLTVRLENMWQERFLSPLLGRFLEGVAAVLATPAEDVFIFNIQNDTDVGGTVLNVSFSALAPRGAGAGAAGPWFSSEELQEQLYVRRAALAARSLLDVLPFDDNVCLREPCENYMKCVSVLRFDSSAPFLASASTLFRPIQPIAGLRCRCPPGFTGDFCETELDLCYSNPCRNGGACARREGGYTCVCRPRFTGEDCELDTEAGRCVPGVCRNGGTCTDAPNGGFRCQCPAGGAFEGPRCEVAARSFPPSSFVMFRGLRQRFHLTLSLSFATVQQSGLLFYNGRLNEKHDFLALELVAGQVRLTYSTGESNTVVSPTVPGGLSDGQWHTVHLRYYNKPRTDALGGAQGPSKDKVAVLSVDDCDVAVALQFGAEIGNYSCAAAGVQTSSKKSLDLTGPLLLGGVPNLPENFPVSHKDFIGCMRDLHIDGRRVDMAAFVANNGTMAGCQAKLHFCDSGPCKNSGFCSERWGSFSCDCPVGFGGKDCQLTMAHPHHFRGNGTLSWNFGSDMAVSVPWYLGLAFRTRATQGVLMQVQAGPHSTLLCQLDRGLLSVTVTRGSGRASHLLLDQVTVSDGRWHDLRLELQEEPGGRRGHHVLMVSLDFSLFQDTMAVGSELQGLKVKQLHVGGLPPGSAEEAPQGLVGCIQGVWLGSTPSGSPALLPPSHRVNAEPGCVVTNACASGPCPPHADCRDLWQTFSCTCQPGYYGPGCVDACLLNPCQNQGSCRHLPGAPHGYTCDCVGGYFGHHCEHRMDQQCPRGWWGSPTCGPCNCDVHKGFDPNCNKTNGQCHCKEFHYRPRGSDSCLPCDCYPVGSTSRSCAPHSGQCPCRPGALGRQCNSCDSPFAEVTASGCRVLYDACPKSLRSGVWWPQTKFGVLATVPCPRGALGAAVRLCDEAQGWLEPDLFNCTSPAFRELSLLLDGLELNKTALDTMEAKKLAQRLREVTGHTDHYFSQDVRVTARLLAHLLAFESHQQGFGLTATQDAHFNENLLWAGSALLAPETGDLWAALGQRAPGGSPGSAGLVRHLEEYAATLARNMELTYLNPMGLVTPNIMLSIDRMEHPSSPRGARRYPRYHSNLFRGQDAWDPHTHVLLPSQSPRPSPSEVLPTSSSIENSTTSSVVPPPAPPEPEPGISIIILLVYRTLGGLLPAQFQAERRGARLPQNPVMNSPVVSVAVFHGRNFLRGILESPISLEFRLLQTANRSKAICVQWDPPGLAEQHGVWTARDCELVHRNGSHARCRCSRTGTFGVLMDASPRERLEGDLELLAVFTHVVVAVSVAALVLTAAILLSLRSLKSNVRGIHANVAAALGVAELLFLLGIHRTHNQLVCTAVAILLHYFFLSTFAWLFVQGLHLYRMQVEPRNVDRGAMRFYHALGWGVPAVLLGLAVGLDPEGYGNPDFCWISVHEPLIWSFAGPVVLVIVMNGTMFLLAARTSCSTGQREAKKTSALTLRSSFLLLLLVSASWLFGLLAVNHSILAFHYLHAGLCGLQGLAVLLLFCVLNADARAAWMPACLGRKAAPEEARPAPGLGPGAYNNTALFEESGLIRITLGASTVSSVSSARSGRTQDQDSQRGRSYLRDNVLVRHGSAADHTDHSLQAHAGPTDLDVAMFHRDAGADSDSDSDLSLEEERSLSIPSSESEDNGRTRGRFQRPLCRAAQSERLLTHPKDVDGNDLLSYWPALGECEAAPCALQTWGSERRLGLDTSKDAANNNQPDPALTSGDETSLGRAQRQRKGILKNRLQYPLVPQTRGAPELSWCRAATLGHRAVPAASYGRIYAGGGTGSLSQPASRYSSREQLDLLLRRQLSRERLEEAPAPVLRPLSRPGSQECMDAAPGRLEPKDRGSTLPRRQPPRDYPGAMAGRFGSRDALDLGAPREWLSTLPPPRRTRDLDPQPPPLPLSPQRQLSRDPLLPSRPLDSLSRSSNSREQLDQVPSRHPSREALGPLPQLLRAREDSVSGPSHGPSTEQLDILSSILASFNSSALSSVQSSSTPLGPHTTATPSATASVLGPSTPRSATSHSISELSPDSEVPRSEGHS

SEQ ID NO: 333 - protein, 1896 aa, Homo sapiens
MKASSGDQGSPPCFLRFPRPVRVVSGAEAELKCVVLGEPPPVVVWEKGGQQLAASERLSFPADGAEHGLLLTAALPTDAGVYVCRARNAAGEAYAAAAVTVLEPPASDPELQPAERPLPSPGSGEGAPVFLTGPRSQWVLRGAEVVLTCRAGGLPEPTLYWEKDGMALDEVWDSSHFALQPGRAEDGPGASLALRILAARLPDSGVYVCHARNAHGHAQAGALLQVHQPPESPPADPDEAPAPVVEPLKCAPKTFWVNEGKHAKFRCYVMGKPEPEIEWHWEGRPLLPDRRRLMYRDRDGGFVLKVLYCQAKDRGLYVCAARNSAGQTLSAVQLHVKEPRLRFTRPLQDVEGREHGIAVLECKVPNSRIPTAWFREDQRLLPCRKYEQIEEGTVRRLIIHRLKADDDGIYLCEMRGRVRTVANVTVKGPILKRLPRKLDVLEGENAVLLVETLEAGVEGRWSRDGEELPVICQSSSGHMHALVLPGVTREDAGEVTFSLGNSRTTTLLRVKCVKHSPPGPPILAEMFKGHKNTVLLTWKPPEPAPETPFIYRLERQEVGSEDWIQCFSIEKAGAVEVPGDCVPSEGDYRFRICTVSGHGRSPHVVFHGSAHLVPTARLVAGLEDVQVYDGEDAVFSLDLSTIIQGTWFLNGEELKSNEPEGQVEPGALRYRIEQKGLQHRLILHAVKHQDSGALVGFSCPGVQDSAALTIQESPVHILSPQDRVSLTFTTSERVVLTCELSRVDFPATWYKDGQKVEESELLVVKMDGRKHRLILPEAKVQDSGEFECRTEGVSAFFGVTVQDPPVHIVDPREHVFVHAITSECVMLACEVDREDAPVRWYKDGQEVEESDFVVLENEGPHRRLVLPATQPSDGGEFQCVAGDECAYFTVTITDVSSWIVYPSGKVYVAAVRLERVVLTCELCRPWAEVRWTKDGEEVVESPALLLQKEDTVRRLVLPAVQLEDSGEYLCEIDDESASFTVTVTEPPVRIIYPRDEVTLIAVTLECVVLMCELSREDAPVRWYKDGLEVEESEALVLERDGPRCRLVLPAAQPEDGGEFVCDAGDDSAFFTVTVTAPPERIVHPAARSLDLHFGAPGRVELRCEVAPAGSQVRWYKDGLEVEASDALQLGAEGPTRTLTLPHAQPEDAGEYVCETRHEAITFNVILAEPPVQFLALETTPSPLCVAPGEPVVLSCELSRAGAPVVWSHNGRPVQEGEGLELHAEGPRRVLCIQAAGPAHAGLYTCQSGAAPGAPSLSFTVQVAEPPVRVVAPEAAQTRVRSTPGGDLELVVHLSGPGGPVRWYKDGERLASQGRVQLEQAGARQVLRVQGARSGDAGEYLCDAPQDSRIFLVSVEEPLLVKLVSELTPLTVHEGDDATFRCEVSPPDADVTWLRNGAVVTPGPQVEMAQNGSSRILTLRGCQLGDAGTVTLRAGSTATSARLHVRETELLFLRRLQDVRAEEGQDVCLEVETGRVGAAGAVRWVRGGQPLPHDSRLSMAQDGHIHRLFIHGVILADQGTYGCESHHDRTLARLSVRPRQLRVLRPLEDVTISEGGSATFQLELSQEGVTGEWARGGVQLYPGPKCHIHSDGHRHRLVLNGLGLADSGCVSFTADSLRCAARLIVREVPVTIVRGPHDLEVTEGDTATFECELSQALADVTWEKDGNALTPSPRLRLQALGTRRLLQLRRCGPSDAGTYSCAVGTARAGPVRLTVRERTVAVLSELRSVSAREGDGATFECTVSEVETTGRWELGGRPLRPGARVRIRQEGKKHILVLSELRAEDAGEVRFQAGPAQSLALLEVEALPLQMCRHPPREKTVLVGRRAVLEVTVSRSGGHVCWLREGAELCPGDKYEMRSHGPTHSLVIHDVRPEDQGTYCCQAGQDSTHTRLLVEGN

SEQ ID NO: 334 - protein, 2136 aa, Homo sapiens
MADVTARSLQYEYKANSNLVLQADRSLIDRTRRDEPTGEVLSLVGKLEGTRMGDKAQRTKPQMQEERRAKRRKRDEDRHDINKMKGYTLLSEGIDEMVGIIYKPKTKETRETYEVLLSFIQAALGDQPRDILCGAADEVLAVLKNEKLRDKERRKEIDLLLGQTDDTRYHVLVNLGKKITDYGGDKEIQNMDDNIDETYGVNVQFESDEEEGDEDVYGEVREEASDDDMEGDEAVVRCTLSANLVASGELMSSKKKDLHPRDIDAFWLQRQLSRFYDDAIVSQKKADEVLEILKTASDDRECENQLVLLLGFNTFDFIKVLRQHRMMILYCTLLASAQSEAEKERIMGKMEADPELSKFLYQLHETEKEDLIREERSRRERVRQSRMDTDLETMDLDQGGEALAPRQVLDLEDLVFTQGSHFMANKRCQLPDGSFRRQRKGYEEVHVPALKPKPFGSEEQLLPVEKLPKYAQAGFEGFKTLNRIQSKLYRAALETDENLLLCAPTGAGKTNVALMCMLREIGKHINMDGTINVDDFKIIYIAPMRSLVQEMVGSFGKRLATYGITVAELTGDHQLCKEEISATQIIVCTPEKWDIITRKGGERTYTQLVRLIILDEIHLLHDDRGPVLEALVARAIRNIEMTQEDVRLIGLSATLPNYEDVATFLRVDPAKGLFYFDNSFRPVPLEQTYVGITEKKAIKRFQIMNEIVYEKIMEHAGKNQVLVFVHSRKETGKTARAIRDMCLEKDTLGLFLREGSASTEVLRTEAEQCKNLELKDLLPYGFAIHHAGMTRVDRTLVEDLFADKHIQVLVSTATLAWGVNLPAHTVIIKGTQVYSPEKGRWTELGALDILQMLGRAGRPQYDTKGEGILITSHGELQYYLSLLNQQLPIESQMVSKLPDMLNAEIVLGNVQNAKDAVNWLGYAYLYIRMLRSPTLYGISHDDLKGDPLLDQRRLDLVHTAALMLDKNNLVKYDKKTGNFQVTELGRIASHYYITNDTVQTYNQLLKPTLSEIELFRVFSLSSEFKNITVREEEKLELQKLLERVPIPVKESIEEPSAKINVLLQAFISQLKLEGFALMADMVYVTQSAGRLMRAIFEIVLNRGWAQLTDKTLNLCKMIDKRMWQSMCPLRQFRKLPEEVVKKIEKKNFPFERLYDLNHNEIGELIRMPKMGKTIHKYVHLFPKLELSVHLQPITRSTLKVELTITPDFQWDEKVHGSSEAFWILVEDVDSEVILHHEYFLLKAKYAQDEHLITFFVPVFEPLPPQYFIRVVSDRWLSCETQLPVSFRHLILPEKYPPPTELLDLQPLPVSALRNSAFESLYQDKFPFFNPIQTQVFNTVYNSDDNVFVGAPTGSGKTICAEFAILRMLLQSSEGRCVYITPMEALAEQVYMDWYEKFQDRLNKKVVLLTGETSTDLKLLGKGNIIISTPEKWDILSRRWKQRKNVQNINLFVVDEVHLIGGENGPVLEVICSRMRYISSQIERPIRIVALSSSLSNAKDVAHWLGCSATSTFNFHPNVRPVPLELHIQGFNISHTQTRLLSMAKPVYHAITKHSPKKPVIVFVPSRKQTRLTAIDILTTCAADIQRQRFLHCTEKDLIPYLEKLSDSTLKETLLNGVGYLHEGLSPMERRLVEQLFSSGAIQVVVASRSLCWGMNVAAHLVIIMDTQYYNGKIHAYVDYPIYDVLQMVGHANRPLQDDEGRCVIMCQGSKKDFFKKFLYEPLPVESHLDHCMHDHFNAEIVTKTIENKQDAVDYLTWTFLYRRMTQNPNYYNLQGISHRHLSDHLSELVEQTLSDLEQSKCISIEDEMDVAPLNLGMIAAYYYINYTTIELFSMSLNAKTKVRGLIEIISNAAEYENIPIRHHEDNLLRQLAQKVPHKLNNPKFNDPHVKTNLLLQAHLSRMQLSAELQSDTEEILSKAIRLIQACVDVLSSNGWLSPALAAMELAQMVTQAMWSKDSYLKQLPHFTSEHIKRCTDKGVESVFDIMEMEDEERNALLQLTDSQIADVARFCNRYPNIELSYEVVDKDSIRSGGPVVVLVQLEREEEVTGPVIAPLFPQKREEGWWVVIGDAKSNSLISIKRLTLQQKAKVKLDFVAPATGAHNYTLYFMSDAYMGCDQEYKFSVDVKEAETDSDSD

SEQ ID NO: 335 - protein, 2367 aa, Homo sapiens
MGTRGAVMPPPMWGLLGCCFVCAWALGGPRPIRSLPPLSSQVKPGSVPMQVPLEGAEAALAYLYSGDAQQLSQVNCSERYEARGAGAMPGLPPSLQGAAGTLAQAANFLNMLLQANDIRESSVEEDVEWYQALVRSVAEGDPRVYRALLTFNPPPGASHLQLALQATRTGEETILQDLSGNWVQEENPPGDLDTPALKKRVLTNDLGSLGSPKWPQADGYVGDTQQVRLSPPFLECQEGRLRPGWLITLSATFYGLKPDLSPEVRGQVQMDVDLQSVDINQCASGPGWYSNTHLCDLNSTQCVPLESQGFVLGRYLCRCRPGFYGASPSGGLEESDFQTTGQFGFPEGRSGRLLQCLPCPEGCTSCMDATPCLVEEAAVLRAAVLACQACCMLAIFLSMLVSYRCRRNKRIWASGVVLLETVLFGFLLLYFPVFILYFKPSVFRCIALRWVRLLGFAIVYGTIILKLYRVLQLFLSRTAQRSALLSSGRLLRRLGLLLLPVLGFLAVWTVGALERGIQHAPLVIRGHTPSGRHFYLCHHDRWDYIMVVAELLLLCWGSFLCYATRAVLSAFHEPRYMGIALHNELLLSAAFHTARFVLVPSLHPDWTLLLFFFHTHSTVTTTLALIFIPKFWKLGAPPREEMVDEVCEDELDLQHSGSYLGSSIASAWSEHSLDPGDIRDELKKLYAQLEVHKTKEMAANNPHLPKKRGSSCQGLGRSFMRYLAEFPEALARQHSRDSGSPGHGSLPGSSRRRLLSSSLQEPEGTPALHKSRSTYDQRREQDPPLLDSLLRRKLAKKASRTESRESVEGPPALGFRSASAHNLTVGERLPRARPASLQKSLSVASSREKALLMASQAYLEETYRQAKEREERKKAKAAMASLVRRPSARRLERPRGAPLSAPPSPAKSSSVDSSHTSGRLHEEARRRLPHPPIRHQVSTPILALSGGLGEPRMLSPTSTLAPALLPALAPTPAPALAPVPVSPQSPNLLTYICPWENAELPAKQENVPQEGPSGPERGHHSPAPARARLWRALSVAVEKSRAGENEMDAEDAHHQREANDVDEDRPKIFPKSHSLKAPVQQGSMRSLGLAIKALTRSRSTYREKESVEESPEGQNSGTAGESMGAPSRSPRLGRPKAVSKQAALIPSDDKESLQNQQNAHTSRMLQVCQREGSREQEDRGRRMTQGLGERKAERAGKTGLAMLRQVSRDKNIKQSKETPVGWQELPKAGLQSLGSADHRVAEVCPWEVTESETRQPDSGNKAEICPWETSEGAPESRALRQDPGDSQKKRGEARGKSEPIDVVPMMRKKPERLVREQEAVCPWESADRGGLSPGSAPQDPGRIRDKSEAGDSVEARKVEKPGWEAAGPEAHTPDITKAEPCPWEASEGGEDGKPAQEAVKDLPQEKQKTRKATFWKEQKPGGDLESLCPWESTDFRGPSAVSIQAPGSSECSGSLGSGIAEVCLWEAGDAPAIQKAEICPWELDDNVMGQEMLSLGTGRESLQEKEKASRKGSFGEMGEQTVKAVQKLSQQQESVCPRESTVPGHSSPCLDNSSSKAGSQFLCNGGSRATQVCPQEDLRPEAQEATPAKTEICPWEVNERTREEWTSAQVPRGGESQKDKEKMPGKSEIEDVTAWEKPEGQIQKQEAVGPWESVDPGSFSPQPRPQDTERPQTLLQMSGSVGSKAADICPLDVEENLTAGKAEICPWEVGAGAGEERALGAEAIRKSPNDTGKVSADLGPRERAVTAPEKPQKPTPEWEVACPWGSVGPGACSQHPGTLDADGPKAGFQELDHMGCRPGEVCPWEAQEAATSEKAKICPWEVSEGTTGKGLDQKAGSESAEQREKALEKGRLTSLGEDVSKGMAKLCQQQETICIWENKDLRESPAQAPKISDLPSSMSSEVAEGHSLEATEKGDLRQDPKTGSFPEHITQEKAPAADTEEFTTEDGEKTSHELQSVCPWETTAPADSVSHLDRQRPDQPKASSQRLVSTGGRAADVCPWDVPDAGVYKSDSSAKAETCPWEVTERIPVKGVSRQDGKGDSQEEKGRAPEKSEPKGVPVQKKPEMADFRQQEAVCPWESQDGKGLSPQPAPDASDRSRGSSEAAGSVETRVAEVCLWEVVEAPSAKKAEICPWEAGGGAAEEGEQERESQGQGEMFLQKAGPGGTEEHFSKAAAKPREQEAVCPGEGTGSGGLLPQSGALDPELKVSPKEAGSMGSRMAELCQWEITDPEGNKIKGTMADICPGEETGVPSEESGLLALTATRREFFPTAPEKPLCLLVHGPLDHFFPESKIPCPKVSRPASTFTLEGVRELQGPSGLEPRTSLAPEPSLQEAESQSSSLTEDSGQVAFEAQYEEFTPPTVYPWDWE

SEQ ID NO: 336 - protein, 2211 aa, Homo sapiens
MMPQKKRRRKKDIDFLALYEAELLNYASEDDEGELEHEYYKARVYEVVTATGDVRGAGTDANVFITLFGENGLSPKLQLTSKSKSAFEKGNVDVFRVRTNNVGLIYKVRIEHDNTGLNASWYLDHVIVTDMKRPHLRYYFNCNNWLSKVEGDRQWCRDLLASFNPMDMPRGNKYEVKVYTGDVIGAGTDADVFINIFGEYGDTGERRLENEKDNFEKGAEDRFILDAPDLGQLMKINVGHNNKGGSAGWFLSQIVIEDIGNKRKYDFPLNRWLALDEDDGKIQRDILVGGAETTAITYIVTVFTGDVRGAGTKSKIYLVMYGARGNKNSGKIFLEGGVFDRGRTDIFHIELAVLLSPLSRVSVGHGNVGVNRGWFCEKVVILCPFTGIQQTFPCSNWLDEKKADGLIERQLYEMVSLRKKRLKKFPWSLWVWTTDLKKAGTNSPIFIQIYGQKGRTDEILLNPNNKWFKPGIIEKFRIELPDLGRFYKIRVWHDKRSSGSGWHLERMTLMNTLNKDKYNFNCNRWLDANEDDNEIVREMTAEGPTVRRIMGMARYHVTVCTGELEGAGTDANVYLCLFGDVGDTGERLLYNCRNNTDLFEKGNADEFTIESVTMRNVRRVRIRHDGKGSGSGWYLDRVLVREEGQPESDNVEFPCLRWLDKDKDDGQLVRELLPSDSSATLKNFRYHISLKTGDVSGASTDSRVYIKLYGDKSDTIKQVLLVSDNNLKDYFERGRVDEFTLETLNIGNINRLVIGHDSTGMHASWFLGSVQIRVPRQGKQYTFPANRWLDKNQADGRLEVELYPSEVVEIQKLVHYEVEIWTGDVGGAGTSARVYMQIYGEKGKTEVLFLSSRSKVFERASKDTFQLEAADVGEVYKLRLGHTGEGFGPSWFVDTVWLRHLVVREVDLTPEEEARKKKEKDKLRQLLKKERLKAKLQRKKKKRKGSDEEDEGEEEESSSSEESSSEEEEMEEEEEEEEFGPGMQEVIEQHKFEAHRWLARGKEDNELVVELVPAGKPGPERNTYEVQVVTGNVPKAGTDANVYLTIYGEEYGDTGERPLKKSDKSNKFEQGQTDTFTIYAIDLGALTKIRIRHDNTGNRAGWFLDRIDITDMNNEITYYFPCQRWLAVEEDDGQLSRELLPVDESYVLPQSEEGRGGGDNNPLDNLALEQKDKSTTFSVTIKTGVKKNAGTDANVFITLFGTQDDTGMTLLKSSKTNSDKFERDSIEIFTVETLDLGDLWKVRLGHDNTGKAPGWFVDWVEVDAPSLGKCMTFPCGRWLAKNEDDGSIIRDLFHAELQTRLYTPFVPYEITLYTSDVFAAGTDANIFIIIYGCDAVCTQQKYLCTNKREQKQFFERKSASRFIVELEDVGEIIEKIRIGHNNTGMNPGWHCSHVDIRRLLPDKDGAETLTFPCDRWLATSEDDKKTIRELVPYDIFTEKYMKDGSLRQVYKEVEEPLDIVLYSVQIFTGNIPGAGTDAKVYITIYGDLGDTGERYLGKSENRTNKFERGTADTFIIEAADLGVIYKIKLRHDNSKWCADWYVEKVEIWNDTNEDEFLFLCGRWLSLKKEDGRLERLFYEKEYTGDRSSNCSSPADFWEIALSSKMADVDISTVTGPMADYVQEGPIIPYYVSVTTGKHKDAATDSRAFIFLIGEDDERSKRIWLDYPRGKRGFSRGSVEEFYVAGLDVGIIKKIEVLYEMTVWTGDVVGGGTDSNIFMTLYGINGSTEEMQLDKKKARFEREQNDTFIMEILDIAPFTKMRIRIDGLGSRPEWFLERILLKNMNTGDLTMFYYGDWLSQRKGKKTLVCEMCAVIDEEEMMEWTSYTVAVKTSDILGAGTDANVFIIIFGENGDSGTLALKQSANWNKFERNNTDTFNFPDMLSLGHLCKLRVWHDNKGIFPGWHLSYVDVKDNSRDETFHFQCDCWLSKSEGDGQTVRDFACANNKICDELEETTYEIVIETGNGGETRENVWLILEGRKNRSKEFLMENSSRQRAFRKGTTDTFEFDSIYLGDIASLCVGHLAREDRFIPKRELAWHVKTITITEMEYGNVYFFNCDCLIPLKRKRKYFKVFEVTKTTESFASKVQSLVPVKYEVIVTTGYEPGAGTDANVFVTIFGANGDTGKRELKQKMRNLFERGSTDRFFLETLELGELRKVRLEHDSSGYCSGWLVEKVEVTNTSTGVATIFNCGRWLDKKRGDGLTWRDLFPSV

SEQ ID NO: 337 - protein, 2113 aa, Homo sapiens
MTGAGEPRREEPPPQPSAGLRSRESGAPSAGGWERAERGRGAAARPATGPPPRRIGPLYGMWLVTFLLLLDSLHKARPEDVGTSLYFVNDSLQQVTFSSSVGVVVPCPAAGSPSAALRWYLATGDDIYDVPHIRHVHANGTLQLYPFSPSAFNSFIHDNDYFCTAENAAGKIRSPNIRVKAVFREPYTVRVEDQRSMRGNVAVFKCLIPSSVQEYVSVVSWEKDTVSIIPEHRFFITYHGGLYISDVQKEDALSTYRCITKHKYSGETRQSNGARLSVTDPAESIPTILDGFHSQEVWAGHTVELPCTASGYPIPAIRWLKDGRPLPADSRWTKRITGLTISDLRTEDSGTYICEVTNTFGSAEATGILMVIDPLHVTLTPKKLKTGIGSTVILSCALTGSPEFTIRWYRNTELVLPDEAISIRGLSNETLLITSAQKSHSGAYQCFATRKAQTAQDFAIIALEDGTPRIVSSFSEKVVNPGEQFSLMCAAKGAPPPTVTWALDDEPIVRDGSHRTNQYTMSDGTTISHMNVTGPQIRDGGVYRCTARNLVGSAEYQARINVRGPPSIRAMRNITAVAGRDTLINCRVIGYPYYSIKWYKDALLLPDNHRQVVFENGTLKLTDVQKGMDEGEYLCSVLIQPQLSISQSVHVAVKVPPLIQPFEFPPASIGQLLYIPCVVSSGDMPIRITWRKDGQVIISGSGVTIESKEFMSSLQISSVSLKHNGNYTCIASNAAATVSRERQLIVRVPPRFVVQPNNQDGIYGKAGVLNCSVDGYPPPKVMWKHAKGSGNPQQYHPVPLTGRIQILPNSSLLIRHVLEEDIGYYLCQASNGVGTDISKSMFLTVKIPAMITSHPNTTIAIKGHAKELNCTARGERPIIIRWEKGDTVIDPDRVMRYAIATKDNGDEVVSTLKLKPADRGDSVFFSCHAINSYGEDRGLIQLTVQEPPDPPELEIREVKARSMNLRWTQRFDGNSIITGFDIEYKNKSDSWDFKQSTRNISPTINQANIVDLHPASVYSIRMYSFNKIGRSEPSKELTISTEEAAPDGPPMDVTLQPVTSQSIQVTWKAPKKELQNGVIRGYQIGYRENSPGSNGQYSIVEMKATGDSEVYTLDNLKKFAQYGVVVQAFNRAGTGPSSSEINATTLEDVPSQPPENVRALSITSDVAVISWSEPPRSTLNGVLKGYRVIFWSLYVDGEWGEMQNITTTRERVELRGMEKFTNYSVQVLAYTQAGDGVRSSVLYIQTKEDVPGPPAGIKAVPSSASSVVVSWLPPTKPNGVIRKYTIFCSSPGSGQPAPSEYETSPEQLFYRIAHLNRGQQYLLWVAAVTSAGRGNSSEKVTIEPAGKAPAKIISFGGTVTTPWMKDVRLPCNSVGDPAPAVKWTKDSEDSAIPVSMDGHRLIHTNGTLLLRAVKAEDSGYYTCTATNTGGFDTIIVNLLVQVPPDQPRLTVSKTSASSITLTWIPGDNGGSSIRGFVLQYSVDNSEEWKDVFISSSERSFKLDSLKCGTWYKVKLAAKNSVGSGRISEIIEAKTHGREPSFSKDQHLFTHINSTHARLNLQGWNNGGCPITAIVLEYRPKGTWAWQGLRANSSGEVFLTELREATWYELRMRACNSAGCGNETAQFATLDYDGSTIPPIKSAQGEGDDVKKLFTIGCPVILATLGVALLFIVRKKRKEKRLKRLRDAKSLAEMLISKNNRSFDTPVKGPPQGPRLHIDIPRVQLLIEDKEGIKQLGDDKATIPVTDAEFSQAVNPQSFCTGVSLHHPTLIQSTGPLIDMSDIRPGTNPVSRKNVKSAHSTRNRYSSQWTLTKCQASTPARTLTSDWRTVGSQHGVTVTESDSYSASLSQDTDKGRNSMVSTESASSTYEELARAYEHAKLEEQLQHAKFEITECFISDSSSDQMTTGTNENADSMTSMSTPSEPGICRFTASPPKPQDADRGKNVAVPIPHRANKSDYCNLPLYAKSEAFFRKADGREPCPVVPPREASIRNLARTYHTQARHLTLDPASKSLGLPHPGAPAAASTATLPQRTLAMPAPPAGTAPPAPGPTPAEPPTAPSAAPPAPSTEPPRAGGPHTKMGGSRDSLLEMSTSGVGRSQKQGAGAYSKSYTLV

SEQ ID NO: 338 - protein, 1626 aa, Homo sapiens
MAGLRGNAVAGLLWMLLLWSGGGGCQAQRAGCKSVHYDLVFLLDTSSSVGKEDFEKVRQWVANLVDTFEVGPDRTRVGVVRYSDRPTTAFELGLFGSQEEVKAAARRLAYHGGNTNTGDALRYITARSFSPHAGGRPRDRAYKQVAILLTDGRSQDLVLDAAAAAHRAGIRIFAVGVGEALKEELEEIASEPKSAHVFHVSDFNAIDKIRGKLRRRLCENVLCPSVRVEGDRFKHTNGGTKEITGFDLMDLFSVKEILGKRENGAQSSYVRMGSFPVVQSTEDVFPQGLPDEYAFVTTFRFRKTSRKEDWYIWQVIDQYSIPQVSIRLDGENKAVEYNAVGAMKDAVRVVFRGSRVNDLFDRDWHKMALSIQAQNVSLHIDCALVQTLPIEERENIDIQGKTVIGKRLYDSVPIDFDLQRIVIYCDSRHAELETCCDIPSGPCQVTVVTEPPPPPPPQRPPTPGSEQIGFLKTINCSCPAGEKGEMGVAGPMGLPGPKGDIGAIGPVGAPGPKGEKGDVGIGPFGQGEKGEKGSLGLPGPPGRDGSKGMRGEPGELGEPGLPGEVGMRGPQGPPGLPGPPGRVGAPGLQGERGEKGTRGEKGERGLDGFPGKPGDTGQQGRPGPSGVAGPQGEKGDVGPAGPPGVPGSVVQQEGLKGEQGAPGPRGHQGAPGPPGARGPIGPEGRDGPPGLQGLRGKKGDMGPPGIPGLLGLQGPPGPPGVPGPPGPGGSPGLPGEIGFPGKPGPPGPTGPPGKDGPNGPPGPPGTKGEPGERGEDGLPGKPGLRGEIGEQGLAGRPGEKGEAGLPGAPGFPGVRGEKGDQGEKGELGLPGLKGDRGEKGEAGPAGPPGLPGTTSLFTPHPRMPGEQGPKGEKGDPGLPGEPGLQGRPGELGPQGPTGPPGAKGQEGAHGAPGAAGNPGAPGHVGAPGPSGPPGSVGAPGLRGTPGKDGERGEKGAAGEEGSPGPVGPRGDPGAPGLPGPPGKGKDGEPGLRGSPGLPGPLGTKAACGKVRGSENCALGGQCVKGDRGAPGIPGSPGSRGDPGIGVAGPPGPSGPPGDKGSPGSRGLPGFPGPQGPAGRDGAPGNPGERGPPGKPGLSSLLSPGDINLLAKDVCNDCPPGPPGLPGLPGFKGDKGVPGKPGREGTEGKKGEAGPPGLPGPPGIAGPQGSQGERGADGEVGQKGDQGHPGVPGFMGPPGNPGPPGADGIAGAAGPPGIQGSPGKEGPPGPQGPSGLPGIPGEEGKEGRDGKPGPPGEPGKAGEPGLPGPEGARGPPGFKGHTGDSGAPGPRGESGAMGLPGQEGLPGKDGDTGPTGPQGPQGPRGPPGKNGSPGSPGEPGPSGTPGQKGSKGENGSPGLPGFLGPRGPPGEPGEKGVPGKEGVPGKPGEPGFKGERGDPGIKGDKGPPGGKGQPGDPGIPGHKGHTGLMGPQGLPGENGPVGPPGPPGQPGFPGLRGESPSMETLRRLIQEELGKQLETRLAYLLAQMPPAYMKSSQGRPGPPGPPGKDGLPGRAGPMGEPGRPGQGGLEGPSGPIGPKGERGAKGDPGAPGVGLRGEMGPPGIPGQPGEPGYAKDGLPGIPGPQGETGPAGHPGLPGPPGPPGQCDPSQCAYFASLAARPGNVKGP

SEQ ID NO: 339 - protein, 1621 aa, Homo sapiens
MAKSGGCGAGAGVGGGNGALTWVNNAAKKEESETANKNDSSKKLSVERVYQKKTQLEHILLRPDTYIGSVEPLTQFMWVYDEDVGMNCREVTFVPGLYKIFDEILVNAADNKQRDKNMTCIKVSIDPESNIISIWNNGKGIPVVEHKVEKVYVPALIFGQLLTSSNYDDDEKKVTGGRNGYGAKLCNIFSTKFTVETACKEYKHSFKQTWMNNMMKTSEAKIKHFDGEDYTCITFQPDLSKFKMEKLDKDIVALMTRRAYDLAGSCRGVKVMFNGKKLPVNGFRSYVDLYVKDKLDETGVALKVIHELANERWDVCLTLSEKGFQQISFVNSIATTKGGRHVDYVVDQVVGKLIEVVKKKNKAGVSVKPFQVKNHIWVFINCLIENPTFDSQTKENMTLQPKSFGSKCQLSEKFFKAASNCGIVESILNWVKFKAQTQLNKKCSSVKYSKIKGIPKLDDANDAGGKHSLECTLILTEGDSAKSLAVSGLGVIGRDRYGVFPLRGKILNVREASHKQIMENAEINNIIKIVGLQYKKSYDDAESLKTLRYGKIMIMTDQDQDGSHIKGLLINFIHHNWPSLLKHGFLEEFITPIVKASKNKQELSFYSIPEFDEWKKHIENQKAWKIKYYKGLGTSTAKEAKEYFADMERHRILFRYAGPEDDAAITLAFSKKKIDDRKEWLTNFMEDRRQRRLHGLPEQFLYGTATKHLTYNDFINKELILFSNSDNERSIPSLVDGFKPGQRKVLFTCFKRNDKREVKVAQLAGSVAEMSAYHHGEQALMMTIVNLAQNFVGSNNINLLQPIGQFGTRLHGGKDAASPRYIFTMLSTLARLLFPAVDDNLLKFLYDDNQRVEPEWYIPIIPMVLINGAEGIGTGWACKLPNYDAREIVNNVRRMLDGLDPHPMLPNYKNFKGTIQELGQNQYAVSGEIFVVDRNTVEITELPVRTWTQVYKEQVLEPMLNGTDKTPALISDYKEYHTDTTVKFVVKMTEEKLAQAEAAGLHKVFKLQTTLTCNSMVLFDHMGCLKKYETVQDILKEFFDLRLSYYGLRKEWLVGMLGAESTKLNNQARFILEKIQGKITIENRSKKDLIQMLVQRGYESDPVKAWKEAQEKAAEEDETQNQHDDSSSDSGTPSGPDFNYILNMSLWSLTKEKVEELIKQRDAKGREVNDLKRKSPSDLWKEDLAAFVEELDKVESQEREDVLAGMSGKAIKGKVGKPKVKKLQLEETMPSPYGRRIIPEITAMKADASKKLLKKKKGDLDTAAVKVEFDEEFSGAPVEGAGEEALTPSVPINKGPKPKREKKEPGTRVRKTPTSSGKPSAKKVKKRNPWSDDESKSESDLEETEPVVIPRDSLLRRAAAERPKYTFDFSEEEDDDADDDDDDNNDLEELKVKASPITNDGEDEFVPSDGLDKDEYTFSPGKSKATPEKSLHDKKSQDFGNLFSFPSYSQKSEDDSAKFDSNEEDSASVFSPSFGLKQTDKVPSKTVAAKKGKPSSDTVPKPKRAPKQKKVVEAVNSDSDSEFGIPKKTTTPKGKGRGAKKRKASGSENEGDYNPGRKTSKTTSKKPKKTSFDQDSDVDIFPSDFPTEPPSLPRTGRARKEVKYFAESDEEEDDVDFAMFN

SEQ ID NO: 340 - protein, 1996 aa, Homo sapiens
MMRTTEDFHKPSATLNSNTATKGRYIYLEAFLEGGAPWGFTLKGGLEHGEPLIISKVEEGGKADTLSSKLQAGDEVVHINEVTLSSSRKEAVSLVKGSYKTLRLVVRRDVCTDPGHADTGASNFVSPEHLTSGPQHRKAAWSGGVKLRLKHRRSEPAGRPHSWHTTKSGEKQPDASMMQISQGMIGPPWHQSYHSSSSTSDLSNYDHAYLRRSPDQCSSQGSMESLEPSGAYPPCHLSPAKSTGSIDQLSHFHNKRDSAYSSFSTSSSILEYPHPGISGRERSGSMDNTSARGGLLEGMRQADIRYVKTVYDTRRGVSAEYEVNSSALLLQGREARASANGQGYDKWSNIPRGKGVPPPSWSQQCPSSLETATDNLPPKVGAPLPPARSDSYAAFRHRERPSSWSSLDQKRLCRPQANSLGSLKSPFIEEQLHTVLEKSPENSPPVKPKHNYTQKAQPGQPLLPTSIYPVPSLEPHFAQVPQPSVSSNGMLYPALAKESGYIAPQGACNKMATIDENGNQNGSGRPGFAFCQPLEHDLLSPVEKKPEATAKYVPSKVHFCSVPENEEDASLKRHLTPPQGNSPHSNERKSTHSNKPSSHPHSLKCPQAQAWQAGEDKRSSRLSEPWEGDFQEDHNANLWRRLEREGLGQSLSGNFGKTKSAFSSLQNIPESLRRHSSLELGRGTQEGYPGGRPTCAVNTKAEDPGRKAAPDLGSHLDRQVSYPRPEGRTGASASFNSTDPSPEEPPAPSHPHTSSLGRRGPGPGSASALQGFQYGKPHCSVLEKVSKFEQREQGSQRPSVGGSGFGHNYRPHRTVSTSSTSGNDFEETKAHIRFSESAEPLGNGEQHFKNGELKLEEASRQPCGQQLSGGASDSGRGPQRPDARLLRSQSTFQLSSEPEREPEWRDRPGSPESPLLDAPFSRAYRNSIKDAQSRVLGATSFRRRDLELGAPVASRSWRPRPSSAHVGLRSPEASASASPHTPRERHSVTPAEGDLARPVPPAARRGARRRLTPEQKKRSYSEPEKMNEVGIVEEAEPAPLGPQRNGMRFPESSVADRRRLFERDGKACSTLSLSGPELKQFQQSALADYIQRKTGKRPTSAAGCSLQEPGPLRERAQSAYLQPGPAALEGSGLASASSLSSLREPSLQPRREATLLPATVAETQQAPRDRSSSFAGGRRLGERRRGDLLSGANGGTRGTQRGDETPREPSSWGARAGKSMSAEDLLERSDVLAGPVHVRSRSSPATADKRQDVLLGQDSGFGLVKDPCYLAGPGSRSLSCSERGQEEMLPLFHHLTPRWGGSGCKAIGDSSVPSECPGTLDHQRQASRTPCPRPPLAGTQGLVTDTRAAPLTPIGTPLPSAIPSGYCSQDGQTGRQPLPPYTPAMMHRSNGHTLTQPPGPRGCEGDGPEHGVEEGTRKRVSLPQWPPPSRAKWAHAAREDSLPEESSAPDFANLKHYQKQQSLPSLCSTSDPDTPLGAPSTPGRISLRISESVLRDSPPPHEDYEDEVFVRDPHPKATSSPTFEPLPPPPPPPPSQETPVYSMDDFPPPPPHTVCEAQLDSEDPEGPRPSFNKLSKVTIARERHMPGAAHVVGSQTLASRLQTSIKGSEAESTPPSFMSVHAQLAGSLGGQPAPIQTQSLSHDPVSGTQGLEKKVSPDPQKSSEDIRTEALAKEIVHQDKSLADILDPDSRLKTTMDLMEGLFPRDVNLLKENSVKRKAIQRTVSSSGCEGKRNEDKEAVSMLVNCPAYYSVSAPKAELLNKIKEMPAEVNEEEEQADVNEKKAELIGSLTHKLETLQEAKGSLLTDIKLNNALGEEVEALISELCKPNEFDKYRMFIGDLDKVVNLLLSLSGRLARVENVLSGLGEDASNEERSSLYEKRKILAGQHEDARELKENLDRRERVVLGILANYLSEEQLQDYQHFVKMKSTLLIEQRKLDDKIKLGQEQVKCLLESLPSDFIPKAGALALPPNLTSEPIPAGGCTFSGIFPTLTSPL

SEQ ID NO: 341 - protein, 740 aa, Homo sapiens
MQWTKVLGLGLGAAALLGLGIILGHFAIPKKANSLAPQDLDLEILETVMGQLDAHRIRENLRELSREPHLASSPRDEDLVQLLLQRWKDPESGLDSAEASTYEVLLSFPSQEQPNVVDIVGPTGGIIHSCHRTEENVTGEQGGPDVVQPYAAYAPSGTPQGLLVYANRGAEEDFKELQTQGIKLEGTIALTRYGGVGRGAKAVNAAKHGVAGVLVYTDPADINDGLSSPDETFPNSWYLPPSGVERGSYYEYFGDPLTPYLPAVPSSFRVDLANVSGFPPIPTQPIGFQDARDLLCNLNGTLAPATWQGALGCHYRLGPGFRPDGDFPADSQVNVSVYNRLELRNSSNVLGIIRGAVEPDRYVLYGNHRDSWVHGAVDPSSGTAVLLELSRVLGTLLKKGTWRPRRSIVFASWGAEEFGLIGSTEFTEEFFNKLQERTVAYINVDISVFANATLRVQGTPPVQSVVFSATKEIRSPGPGDLSIYDNWIRYFNRSSPVYGLVPSLGSLGAGSDYAPFVHFLGISSMDIAYTYDRSKTSARIYPTYHTAFDTFDYVDKFLDPGFSSHQAVARTAGSVILRLSDSFFLPLKVSDYSETLRSFLQAAQQDLGALLEQHSISLGPLVTAVEKFEAEAAALGQRISTLQKGSPDPLQVRMLNDQLMLLERTFLNPRAFPEERYYSHVLWAPRTGSVVTFPGLSNACSRARDTASGSEAWAEVQRQLSIVVTALEGAAATLRPVADL

SEQ ID NO: 342 - protein, 1719 aa, Homo sapiens
MSGEVRLRQLEQFILDGPAQTNGQCFSVETLLDILICLYDECNNSPLRREKNILEYLEWAKPFTSKVKQMRLHREDFEILKVIGRGAFGEVAVVKLKNADKVFAMKILNKWEMLKRAETACFREERDVLVNGDNKWITTLHYAFQDDNNLYLVMDYYVGGDLLTLLSKFEDRLPEDMARFYLAEMVIAIDSVHQLHYVHRDIKPDNILMDMNGHIRLADFGSCLKLMEDGTVQSSVAVGTPDYISPEILQAMEDGKGRYGPECDWWSLGVCMYEMLYGETPFYAESLVETYGKIMNHKERFQFPAQVTDVSENAKDLIRRLICSREHRLGQNGIEDFKKHPFFSGIDWDNIRNCEAPYIPEVSSPTDTSNFDVDDDCLKNSETMPPPTHTAFSGHHLPFVGFTYTSSCVLSDRSCLRVTAGPTSLDLDVNVQRTLDNNLATEAYERRIKRLEQEKLELSRKLQESTQTVQALQYSTVDGPLTASKDLEIKNLKEEIEKLRKQVTESSHLEQQLEEANAVRQELDDAFRQIKAYEKQIKTLQQEREDLNKELVQASERLKNQSKELKDAHCQRKLAMQEFMEINERLTELHTQKQKLARHVRDKEEEVDLVMQKVESLRQELRRTERAKKELEVHTEALAAEASKDRKLREQSEHYSKQLENELEGLKQKQISYSPGVCSIEHQQEITKLKTDLEKKSIFYEEELSKREGIHANEIKNLKKELHDSEGQQLALNKEIMILKDKLEKTRRESQSEREEFESEFKQQYEREKVLLTEENKKLTSELDKLTTLYENLSIHNQQLEEEVKDLADKKESVAHWEAQITEIIQWVSDEKDARGYLQALASKMTEELEALRNSSLGTRATDMPWKMRRFAKLDMSARLELQSALDAEIRAKQAIQEELNKVKASNIITECKLKDSEKKNLELLSEIEQLIKDTEELRSEKGIEHQDSQHSFLAFLNTPTDALDQFETVDSTPLSVHTPTLRKKGCPGSTGFPPKRKTHQFFVKSFTTPTKCHQCTSLMVGLIRQGCSCEVCGFSCHITCVNKAPTTCPVPPEQTKGPLGIDPQKGIGTAYEGHVRIPKPAGVKKGWQRALAIVCDFKLFLYDIAEGKASQPSVVISQVIDMRDEEFSVSSVLASDVIHASRKDIPCIFRVTASQLSASNNKCSILMLADTENEKNKWVGVLSELHKILKKNKFRDRSVYVPKEAYDSTLPLIKTTQAAAIIDHERIALGNEEGLFVVHVTKDEIIRVGDNKKIHQIELIPNDQLVAVISGRNRHVRLFPMSALDGRETDFYKLSETKGCQTVTSGKVRHGALTCLCVAMKRQVLCYELFQSKTRHRKFKEIQVPYNVQWMAIFSEQLCVGFQSGFLRYPLNGEGNPYSMLHSNDHTLSFIAHQPMDAICAVEISSKEYLLCFNSIGIYTDCQGRRSRQQELMWPANPSSCCYNAPYLSVYSENAVDIFDVNSMEWIQTLPLKKVRPLNNEGSLNLLGLETIRLIYFKNKMAEGDELVVPETSDNSRKQMVRNINNKRRYSFRVPEEERMQQRREMLRDPEMRNKLISNPTNFNHIAHMGPGDGIQILKDLPMNPRPQESRTVFSGSVSIPSITKSRPEPGRSMSASSGLSARSSAQNGSALKREFSGGSYSAKRQPMPSPSEGSLSSGGMDQGSDAPARDFDGEDSDSPRHSTASNSSNLSSPPSPASPRKTKSLSLESTDRGSWDP

SEQ ID NO: 343 - protein, 1884 aa, Homo sapiens
MDLSALRVEEVQNVINAMQKILECPICLELIKEPVSTKCDHIFCKFCMLKLLNQKKGPSQCPLCKNDITKRSLQESTRFSQLVEELLKIICAFQLDTGLEYANSYNFAKKENNSPEHLKDEVSIIQSMGYRNRAKRLLQSEPENPSLQETSLSVQLSNLGTVRTLRTKQRIQPQKTSVYIELGSDSSEDTVNKATYCSVGDQELLQITPQGTRDEISLDSAKKAACEFSETDVTNTEHHQPSNNDLNTTEKRAAERHPEKYQGSSVSNLHVEPCGTNTHASSLQHENSSLLLTKDRMNVEKAEFCNKSKQPGLARSQHNRWAGSKETCNDRRTPSTEKKVDLNADPLCERKEWNKQKLPCSENPRDTEDVPWITLNSSIQKVNEWFSRSDELLGSDDSHDGESESNAKVADVLDVLNEVDEYSGSSEKIDLLASDPHEALICKSERVHSKSVESNIEDKIFGKTYRKKASLPNLSHVTENLIIGAFVTEPQIIQERPLTNKLKRKRRPTSGLHPEDFIKKADLAVQKTPEMINQGTNQTEQNGQVMNITNSGHENKTKGDSIQNEKNPNPIESLEKESAFKTKAEPISSSISNMELELNIHNSKAPKKNRLRRKSSTRHIHALELVVSRNLSPPNCTELQIDSCSSSEEIKKKKYNQMPVRHSRNLQLMEGKEPATGAKKSNKPNEQTSKRHDSDTFPELKLTNAPGSFTKCSNTSELKEFVNPSLPREEKEEKLETVKVSNNAEDPKDLMLSGERVLQTERSVESSSISLVPGTDYGTQESISLLEVSTLGKAKTEPNKCVSQCAAFENPKGLIHGCSKDNRNDTEGFKYPLGHEVNHSRETSIEMEESELDAQYLQNTFKVSKRQSFAPFSNPGNAEEECATFSAHSGSLKKQSPKVTFECEQKEENQGKNESNIKPVQTVNITAGFPVVGQKDKPVDNAKCSIKGGSRFCLSSQFRGNETGLITPNKHGLLQNPYRIPPLFPIKSFVKTKCKKNLLEENFEEHSMSPEREMGNENIPSTVSTISRNNIRENVFKEASSSNINEVGSSTNEVGSSINEIGSSDENIQAELGRNRGPKLNAMLRLGVLQPEVYKQSLPGSNCKHPEIKKQEYEEVVQTVNTDFSPYLISDNLEQPMGSSHASQVCSETPDDLLDDGEIKEDTSFAENDIKESSAVFSKSVQKGELSRSPSPFTHTHLAQGYRRGAKKLESSEENLSSEDEELPCFQHLLFGKVNNIPSQSTRHSTVATECLSKNTEENLLSLKNSLNDCSNQVILAKASQEHHLSEETKCSASLFSSQCSELEDLTANTNTQDPFLIGSSKQMRHQSESQGVGLSDKELVSDDEERGTGLEENNQEEQSMDSNLGEAASGCESETSVSEDCSGLSSQSDILTTQQRDTMQHNLIKLQQEMAELEAVLEQHGSQPSNSYPSIISDSSALEDLRNPEQSTSEKDSHIHGQRNNSMFSKRPREHISVLTSQKSSEYPISQNPEGLSADKFEVSADSSTSKNKEPGVERSSPSKCPSLDDRWYMHSCSGSLQNRNYPSQEELIKVVDVEEQQLEESGPHDLTETSYLPRQDLEGTPYLESGISLFSDDPESDPSEDRAPESARVGNIPSSTSALKVPQLKVAESAQSPAAAHTTDTAGYNAMEESVSREKPELTASTERVNKRMSMVVSGLTPEEFMLVYKFARKHHITLTNLITEETTHVVMKTDAEFVCERTLKYFLGIAGGKWVVSYFWVTQSIKERKMLNEHDFEVRGDVVNGRNHQGPKRARESQDRKIFRGLEICCYGPFTNMPTDQLEWMVQLCGASVVKELSSFTLGTGVHPIVVVQPDAWTEDNGFHAIGQMCEAPVVTREWVLDSVALYQCQELDTYLIPQIPHSHY

SEQ ID NO: 344 - protein, 2243 aa, Homo sapiens
MNIIRENKDLACFYTTKHSWRGKYKRVFSVGTHAITTYNPNTLEVTNQWPYGDICSISPVGKGQGTEFNLTFRKGSGKKSETLKFSTEHRTELLTEALRFRTDFSEGKITGRRYNCYKHHWSDSRKPVILEVTPGGFDQINPATNRVLCSYDYRNIEGFVDLSDYQGGFCILYGGFSRLHLFASEQREEIIKSAIDHAGNYIGISLRIRKEPLEFEQYLNLRFGKYSTDESITSLAEFVVQKISPRHSEPVKRVLALTETCLVERDPATYNIATLKPLGEVFALVCDSENPQLFTIEFIKGQVRKYSSTERDSLLASLLDGVRASGNRDVCVKMTPTHKGQRWGLLSMPVDEEVESLHLRFLATPPNGNFADAVFRFNANISYSGVLHAVTQDGLFSENKEKLINNAITALLSQEGDVVASNAELESQFQAVRRLVASKAGFLAFTQLPKFRERLGVKVVKALKRSNNGIIHAAVDMLCALMCPMHDDYDLRQEQLNKASLLSSKKFLENLLEKFNSHVDHGTGALVISSLLDFLTFALCAPYSETTEGQQFDMLLEMVASNGRTLFKLFQHPSMAIIKGAGLVMKAIIEEGDKEIATKMQELALSEGALPRHLHTAMFTISSDQRMLTNRQLSRHLVGLWTADNATATNLLKRILPPGLLAYLESSDLVPEKDADRMHVRDNVKIAMDQYGKFNKVPEWQRLAGKAAKEVEKFAKEKVDLVLMHWRDRMGIAQKENINQKPVVLRKRRQRIKIEANWDLFYYRFGQDHARSNLIWNFKTREELKDTLESEMRAFNIDRELGSANVISWNHHEFEVKYECLAEEIKIGDYYLRLLLEEDENEESGSIKRSYEFFNELYHRFLLTPKVNMKCLCLQALAIVYGRCHEEIGPFTDTRYIIGMLERCTDKLERDRLILFLNKLILNKKNVKDLMDSNGIRILVDLLTLAHLHVSRATVPLQSNVIEAAPDMKRESEKEWYFGNADKERSGPYGFHEMQELWTKGMLNAKTRCWAQGMDGWRPLQSIPQLKWCLLASGQAVLNETDLATLILNMLITMCGYFPSRDQDNAIIRPLPKVKRLLSDSTCLPHIIQLLLTFDPILVEKVAILLYHIMQDNPQLPRLYLSGVFFFIMMYTGSNVLPVARFLKYTHTKQAFKSEETKGQDIFQRSILGHILPEAMVCYLENYEPEKFSEIFLGEFDTPEAIWSSEMRRLMIEKIAAHLADFTPRLQSNTRALYQYCPIPIINYPQLENELFCNIYYLKQLCDTLRFPDWPIKDPVKLLKDTLDAWKKEVEKKPPMMSIDDAYEVLNLPQGQGPHDESKIRKAYFRLAQKYHPDKNPEGRDMFEKVNKAYEFLCTKSAKIVDGPDPENIILILKTQSILFNRHKEDLQPYKYAGYPMLIRTITMETSDDLLFSKESPLLPAATELAFHTVNCSALNAEELRRENGLEVLQEAFSRCVAVLTRASKPSDMSVQVCGYISKCYSVAAQFEECREKITEMPSIIKDLCRVLYFGKSIPRVAALGVECVSSFAVDFWLQTHLFQAGILWYLLGFLFNYDYTLEESGIQKSEETNQQEVANSLAKLSVHALSRLGGYLAEEQATPENPTIRKSLAGMLTPYVARKLAVASVTEILKMLNSNTESPYLIWNNSTRAELLEFLESQQENMIKKGDCDKTYGSEFVYSDHAKELIVGEIFVRVYNEVPTFQLEVPKAFAASLLDYIGSQAQYLHTFMAITHAAKVESEQHGDRLPRVEMALEALRNVIKYNPGSESECIGHFKLIFSLLRVHGAGQVQQLALEVVNIVTSNQDCVNNIAESMVLSSLLALLHSLPSSRQLVLETLYALTSSTKIIKEAMAKGALIYLLDMFCNSTHPQVRAQTAELFAKMTADKLIGPKVRITLMKFLPSVFMDAMRDNPEAAVHIFEGTHENPELIWNDNSRDKVSTTVREMMLEHFKNQQDNPEANWKLPEDFAVVFGEAEGELAVGGVFLRIFIAQPAWVLRKPREFLIALLEKLTELLEKNNPHGETLETLTMATVCLFSAQPQLADQVPPLGHLPKVIQAMNHRNNAIPKSAIRVIHALSENELCVRAMASLETIGPLMNGMKKRADTVGLACEAINRMFQKEQSELVAQALKADLVPYLLKLLEGIGLENLDSPAATKAQIVKALKAMTRSLQYGEQVNEILCRSSVWSAFKDQKHDLFISESQTAGYLTGPGVAGYLTAGTSTSVMSNLPPPVDHEAGDLGYQT

SEQ ID NO: 345 - protein, 3830 aa, Homo sapiens
MAFVATQGATVVDQTTLMKKYLQFVAALTDVNTPDETKLKMMQEVSENFENVTSSPQYSTFLEHIIPRFLTFLQDGEVQFLQEKPAQQLRKLVLEIIHRIPTNEHLRPHTKNVLSVMFRFLETENEENVLICLRIIIELHKQFRPPITQEIHHFLDFVKQIYKELPKVVNRYFENPQVIPENTVPPPEMVGMITTIAVKVNPEREDSETRTHSIIPRGSLSLKVLAELPIIVVLMYQLYKLNIHNVVAEFVPLIMNTIAIQVSAQARQHKLYNKELYADFIAAQIKTLSFLAYIIRIYQELVTKYSQQMVKGMLQLLSNCPAETAHLRKELLIAAKHILTTELRNQFIPCMDKLFDESILIGSGYTARETLRPLAYSTLADLVHHVRQHLPLSDLSLAVQLFAKNIDDESLPSSIQTMSCKLLLNLVDCIRSKSEQESGNGRDVLMRMLEVFVLKFHTIARYQLSAIFKKCKPQSELGAVEAALPGVPTAPAAPGPAPSPAPVPAPPPPPPPPPPATPVTPAPVPPFEKQGEKDKEDKQTFQVTDCRSLVKTLVCGVKTITWGITSCKAPGEAQFIPNKQLQPKETQIYIKLVKYAMQALDIYQVQIAGNGQTYIRVANCQTVRMKEEKEVLEHFAGVFTMMNPLTFKEIFQTTVPYMVERISKNYALQIVANSFLANPTTSALFATILVEYLLDRLPEMGSNVELSNLYLKLFKLVFGSVSLFAAENEQMLKPHLHKIVNSSMELAQTAKEPYNYFLLLRALFRSIGGGSHDLLYQEFLPLLPNLLQGLNMLQSGLHKQHMKDLFVELCLTVPVRLSSLLPYLPMLMDPLVSALNGSQTLVSQGLRTLELCVDNLQPDFLYDHIQPVRAELMQALWRTLRNPADSISHVAYRVLGKFGGSNRKMLKESQKLHYVVTEVQGPSITVEFSDCKASLQLPMEKAIETALDCLKSANTEPYYRRQAWEVIKCFLVAMMSLEDNKHALYQLLAHPNFTEKTIPNVIISHRYKAQDTPARKTFEQALTGAFMSAVIKDLRPSALPFVASLIRHYTMVAVAQQCGPFLLPCYQVGSQPSTAMFHSEENGSKGMDPLVLIDAIAICMAYEEKELCKIGEVALAVIFDVASIILGSKERACQLPLFSYIVERLCACCYEQAWYAKLGGVVSIKFLMERLPLTWVLQNQQTFLKALLFVMMDLTGEVSNGAVAMAKTTLEQLLMRCATPLKDEERAEEIVAAQEKSFHHVTHDLVREVTSPNSTVRKQAMHSLQVLAQVTGKSVTVIMEPHKEVLQDMVPPKKHLLRHQPANAQIGLMEGNTFCTTLQPRLFTMDLNVVEHKVFYTELLNLCEAEDSALTKLPCYKSLPSLVPLRIAALNALAACNYLPQSREKIIAALFKALNSTNSELQEAGEACMRKFLEGATIEVDQIHTHMRPLLMMLGDYRSLTLNVVNRLTSVTRLFPNSFNDKFCDQMMQHLRKWMEVVVITHKGGQRSDGNEMKICSAIINLFHLIPAAPQTLVKPLLEVVMKTERAMLIEAGSPFREPLIKFLTRHPSQTVELFMMEATLNDPQWSRMFMSFLKHKDARPLRDVLAANPNRFITLLLPGGAQTAVRPGSPSTSTMRLDLQFQAIKIISIIVKNDDSWLASQHSLVSQLRRVWVSENFQERHRKENMAATNWKEPKLLAYCLLNYCKRNYGDIELLFQLLRAFTGRFLCNMTFLKEYMEEEIPKNYSIAQKRALFFRFVDFNDPNFGDELKAKVLQHILNPAFLYSFEKGEGEQLLGPPNPEGDNPESITSVFITKVLDPEKQADMLDSLRIYLLQYATLLVEHAPHHIHDNNKNRNSKLRRLMTFAWPCLLSKACVDPACKYSGHLLLAHIIAKFAIHKKIVLQVFHSLLKAHAMEARAIVRQAMAILTPAVPARMEDGHQMLTHWTRKIIVEEGHTVPQLVHILHLIVQHFKVYYPVRHHLVQHMVSAMQRLGFTPSVTIEQRRLAVDLSEVVIKWELQRIKDQQPDSDMDPNSSGEGVNSVSSSIKRGLSVDSAQEVKRFRTATGAISAVFGRSQSLPGADSLLAKPIDKQHTDTVVNFLIRVACQVNDNTNTAGSPGEVLSRRCVNLLKTALRPDMWPKSELKLQWFDKLLMTVEQPNQVNYGNICTGLEVLSFLLTVLQSPAILSSFKPLQRGIAACMTCGNTKVLRAVHSLLSRLMSIFPTEPSTSSVASKYEELECLYAAVGKVIYEGLTNYEKATNANPSQLFGTLMILKSACSNNPSYIDRLISVFMRSLQKMVREHLNPQAASGSTEATSGTSELVMLSLELVKTRLAVMSMEMRKNFIQAILTSLIEKSPDAKILRAVVKIVEEWVKNNSPMAANQTPTLREKSILLVKMMTYIEKRFPEDLELNAQFLDLVNYVYRDETLSGSELTAKLEPAFLSGLRCAQPLIRAKFFEVFDNSMKRRVYERLLYVTCSQNWEAMGNHFWIKQCIELLLAVCEKSTPIGTSCQGAMLPSITNVINLADSHDRAAFAMVTHVKQEPRERENSESKEEDVEIDIELAPGDQTSTPKTKELSEKDIGNQLHMLTNRHDKFLDTLREVKTGALLSAFVQLCHISTTLAEKTWVQLFPRLWKILSDRQQHALAGEISPFLCSGSHQVQRDCQPSALNCFVEAMSQCVPPIPIRPCVLKYLGKTHNLWFRSTLMLEHQAFEKGLSLQIKPKQTTEFYEQESITPPQQEILDSLAELYSLLQEEDMWAGLWQKRCKYSETATAIAYEQHGFFEQAQESYEKAMDKAKKEHERSNASPAIFPEYQLWEDHWIRCSKELNQWEALTEYGQSKGHINPYLVLECAWRVSNWTAMKEALVQVEVSCPKEMAWKVNMYRGYLAICHPEEQQLSFIERLVEMASSLAIREWRRLPHVVSHVHTPLLQAAQQIIELQEAAQINAGLQPTNLGRNNSLHDMKTVVKTWRNRLPIVSDDLSHWSSIFMWRQHHYQAIVTAYENSSQHDPSSNNAMLGVHASASAIIQYGKIARKQGLVNVALDILSRIHTIPTVPIVDCFQKIRQQVKCYLQLAGVMGKNECMQGLEVIESTNLKYFTKEMTAEFYALKGMFLAQINKSEEANKAFSAAVQMHDVLVKAWAMWGDYLENIFVKERQLHLGVSAITCYLHACRHQNESKSRKYLAKVLWLLSFDDDKNTLADAVDKYCIGVPPIQWLAWIPQLLTCLVGSEGKLLLNLISQVGRVYPQAVYFPIRTLYLTLKIEQRERYKSDPGPIRATAPMWRCSRIMHMQRELHPTLLSSLEGIVDQMVWFRENWHEEVLRQLQQGLAKCYSVAFEKSGAVSDAKITPHTLNFVKKLVSTFGVGLENVSNVSTMFSSAASESLARRAQATAQDPVFQKLKGQFTTDFDFSVPGSMKLHNLISKLKKWIKILEAKTKQLPKFFLIEEKCRFLSNFSAQTAEVEIPGEFLMPKPTHYYIKIARFMPRVEIVQKHNTAARRLYIRGHNGKIYPYLVMNDACLTESRREERVLQLLRLLNPCLEKRKETTKRHLFFTVPRVVAVSPQMRLVEDNPSSLSLVEIYKQRCAKKGIEHDNPISRYYDRLATVQARGTQASHQVLRDILKEVQSNMVPRSMLKEWALHTFPNATDYWTFRKMFTIQLALIGFAEFVLHLNRLNPEMLQIAQDTGKLNVAYFRFDINDATGDLDANRPVPFRLTPNISEFLTTIGVSGPLTASMIAVARCFAQPNFKVDGILKTVLRDEIIAWHKKTQEDTSSPLSAAGQPENMDSQQLVSLVQKAVTAIMTRLHNLAQFEGGESKVNTLVAAANSLDNLCRMDPAWHPWL

SEQ ID NO: 346 - protein, 2813 aa, Homo sapiens
MIPARFAGVLLALALILPGTLCAEGTRGRSSTARCSLFGSDFVNTFDGSMYSFAGYCSYLLAGGCQKRSFSIIGDFQNGKRVSLSVYLGEFFDIHLFVNGTVTQGDQRVSMPYASKGLYLETEAGYYKLSGEAYGFVARIDGSGNFQVLLSDRYFNKTCGLCGNFNIFAEDDFMTQEGTLTSDPYDFANSWALSSGEQWCERASPPSSSCNISSGEMQKGLWEQCQLLKSTSVFARCHPLVDPEPFVALCEKTLCECAGGLECACPALLEYARTCAQEGMVLYGWTDHSACSPVCPAGMEYRQCVSPCARTCQSLHINEMCQERCVDGCSCPEGQLLDEGLCVESTECPCVHSGKRYPPGTSLSRDCNTCICRNSQWICSNEECPGECLVTGQSHFKSFDNRYFTFSGICQYLLARDCQDHSFSIVIETVQCADDRDAVCTRSVTVRLPGLHNSLVKLKHGAGVAMDGQDVQLPLLKGDLRIQHTVTASVRLSYGEDLQMDWDGRGRLLVKLSPVYAGKTCGLCGNYNGNQGDDFLTPSGLAEPRVEDFGNAWKLHGDCQDLQKQHSDPCALNPRMTRFSEEACAVLTSPTFEACHRAVSPLPYLRNCRYDVCSCSDGRECLCGALASYAAACAGRGVRVAWREPGRCELNCPKGQVYLQCGTPCNLTCRSLSYPDEECNEACLEGCFCPPGLYMDERGDCVPKAQCPCYYDGEIFQPEDIFSDHHTMCYCEDGFMHCTMSGVPGSLLPDAVLSSPLSHRSKRSLSCRPPMVKLVCPADNLRAEGLECTKTCQNYDLECMSMGCVSGCLCPPGMVRHENRCVALERCPCFHQGKEYAPGETVKIGCNTCVCRDRKWNCTDHVCDATCSTIGMAHYLTFDGLKYLFPGECQYVLVQDYCGSNPGTFRILVGNKGCSHPSVKCKKRVTILVEGGEIELFDGEVNVKRPMKDETHFEVVESGRYIILLLGKALSVVWDRHLSISVVLKQTYQEKVCGLCGNFDGIQNNDLTSSNLQVEEDPVDFGNSWKVSSQCADTRKVPLDSSPATCHNNIMKQTMVDSSCRILTSDVFQDCNKLVDPEPYLDVCIYDTCSCESIGDCACFCDTIAAYAHVCAQHGKVVTWRTATLCPQSCEERNLRENGYECEWRYNSCAPACQVTCQHPEPLACPVQCVEGCHAHCPPGKILDELLQTCVDPEDCPVCEVAGRRFASGKKVTLNPSDPEHCQICHCDVVNLTCEACQEPGGLVVPPTDAPVSPTTLYVEDISEPPLHDFYCSRLLDLVFLLDGSSRLSEAEFEVLKAFVVDMMERLRISQKWVRVAVVEYHDGSHAYIGLKDRKRPSELRRIASQVKYAGSQVASTSEVLKYTLFQIFSKIDRPEASRITLLLMASQEPQRMSRNFVRYVQGLKKKKVIVIPVGIGPHANLKQIRLIEKQAPENKAFVLSSVDELEQQRDEIVSYLCDLAPEAPPPTLPPDMAQVTVGPGLLGVSTLGPKRNSMVLDVAFVLEGSDKIGEADFNRSKEFMEEVIQRMDVGQDSIHVTVLQYSYMVTVEYPFSEAQSKGDILQRVREIRYQGGNRTNTGLALRYLSDHSFLVSQGDREQAPNLVYMVTGNPASDEIKRLPGDIQVVPIGVGPNANVQELERIGWPNAPILIQDFETLPREAPDLVLQRCCSGEGLQIPTLSPAPDCSQPLDVILLLDGSSSFPASYFDEMKSFAKAFISKANIGPRLTQVSVLQYGSITTIDVPWNVVPEKAHLLSLVDVMQREGGPSQIGDALGFAVRYLTSEMHGARPGASKAVVILVTDVSVDSVDAAADAARSNRVTVFPIGIGDRYDAAQLRILAGPAGDSNVVKLQRIEDLPTMVTLGNSFLHKLCSGFVRICMDEDGNEKRPGDVWTLPDQCHTVTCQPDGQTLLKSHRVNCDRGLRPSCPNSQSPVKVEETCGCRWTCPCVCTGSSTRHIVTFDGQNFKLTGSCSYVLFQNKEQDLEVILHNGACSPGARQGCMKSIEVKHSALSVELHSDMEVTVNGRLVSVPYVGGNMEVNVYGAIMHEVRFNHLGHIFTFTPQNNEFQLQLSPKTFASKTYGLCGICDENGANDFMLRDGTVTTDWKTLVQEWTVQRPGQTCQPILEEQCLVPDSSHCQVLLLPLFAECHKVLAPATFYAICQQDSCHQEQVCEVIASYAHLCRTNGVCVDWRTPDFCAMSCPPSLVYNHCEHGCPRHCDGNVSSCGDHPSEGCFCPPDKVMLEGSCVPEEACTQCIGEDGVQHQFLEAWVPDHQPCQICTCLSGRKVNCTTQPCPTAKAPTCGLCEVARLRQNADQCCPEYECVCDPVSCDLPPVPHCERGLQPTLTNPGECRPNFTCACRKEECKRVSPPSCPPHRLPTLRKTQCCDEYECACNCVNSTVSCPLGYLASTATNDCGCTTTTCLPDKVCVHRSTIYPVGQFWEEGCDVCTCTDMEDAVMGLRVAQCSQKPCEDSCRSGFTYVLHEGECCGRCLPSACEVVTGSPRGDSQSSWKSVGSQWASPENPCLINECVRVKEEVFIQQRNVSCPQLEVPVCPSGFQLSCKTSACCPSCRCERMEACMLNGTVIGPGKTVMIDVCTTCRCMVQVGVISGFKLECRKTTCNPCPLGYKEENNTGECCGRCLPTACTIQLRGGQIMTLKRDETLQDGCDTHFCKVNERGEYFWEKRVTGCPPFDEHKCLAEGGKIMKIPGTCCDTCEEPECNDITARLQYVKVGSCKSEVEVDIHYCQGKCASKAMYSIDINDVQDQCSCCSPTRTEPMQVALHCTNGSVVYHEVLNAMECKCSPRKCSK

SEQ ID NO: 347 - protein, 133 aa, Homo sapiens
MRLPAQLLGLLMLWVPGSSGDVVMTQSPLSLPVTLGQPASISCRSSQSLVYSDGNTYLNWFQQRPGQSPRRLIYKVSNRDSGVPDRFSGSGSGTDFTLKISRVEAEDVGVYYCMQGTHWSWTFGQGTKVEIKR

SEQ ID NO: 348 - protein, 2715 aa, Homo sapiens
MKMKIQKKEKQLSNLKVLNHSPMSDASVNFDYKSPSPFDCSTDQEEKIEDVASHCLPQKDLYTAEEEAATLFPRKMTSHNGMEDSGGGGTGVKKKRKKKEPGDQEGAAKGSKDREPKPKRKREPKEPKEPRKAKEPKKAKEHKEPKQKDGAKKARKPREASGTKEAKEKRSCTDSAARTKSRKASKEQGPTPVEKKKKGKRKSETTVESLELDQGLTNPSLRSPEESTESTDSQKRRSGRQVKRRKYNEDLDFKVVDDDGETIAVLGAGRTSALSASTLAWQAEEPPEDDANIIEKILASKTVQEVHPGEPPFDLELFYVKYRNFSYLHCKWATMEELEKDPRIAQKIKRFRNKQAQMKHIFTEPDEDLFNPDYVEVDRILEVAHTKDAETGEEVTHYLVKWCSLPYEESTWELEEDVDPAKVKEFESLQVLPEIKHVERPASDSWQKLEKSREYKNSNQLREYQLEGMNWLLFNWYNRKNCILADEMGLGKTIQSITFLSEIFLRGIHGPFLIIAPLSTITNWEREFRTWTEMNAIVYHGSQISRQMIQQYEMVYRDAQGNPLSGVFKFHVVITTFEMILADCPELKKIHWSCVIIDEAHRLKNRNCKLLEGLKLMALEHKVLLTGTPLQNSVEELFSLLNFLEPSQFPSETAFLEEFGDLKTEEQVKKLQSILKPMMLRRLKDDVEKNLAPKQETIIEVELTNIQKKYYRAILEKNFSFLTKGANQHNMPNLINTMMELRKCCNHPYLINGAEEKILEDFRKTHSPDAPDFQLQAMIQAAGKLVLIDKLLPKLIAGGHKVLIFSQMVRCLDILEDYLIQRRYTYERIDGRVRGNLRQAAIDRFCKPDSDRFVFLLCTRAGGLGINLTAADTCIIFDSDWNPQNDLQAQARCHRIGQSKAVKVYRLITRNSYEREMFDKASLKLGLDKAVLQDINRKGGTNGVQQLSKMEVEDLLRKGAYGALMDEEDEGSKFCEEDIDQILQRRTHTITIQSEGKGSTFAKASFVASGNRTDISLDDPNFWQKWAKIAELDTEAKNEKESLVIDRPRVRKQTKHYNSFEEDELMEFSELDSDSDERPTRSRRLNDKARRYLRAECFRVEKNLLIFGWGRWKDILTHGRFKWHLNEKDMEMICRALLVYCVKHYKGDEKIKSFIWELITPTKDGQAQTLQNHSGLSAPVPRGRKGKKTKNQLLIPELKDADWLATCNPEVVLHDDGYKKHLKQHCNKVLLRVRMLYYLKAEILGEAAEKAFEGSPARELDVPLPDIDYMEIPVDWWDAEADKSLLIGVFKHGYERYNAMRADPALCFLEKVGMPDEKSLSAEQGVTDGTSDIPERGNTDKEDNAEDKVDGLQKQTESSSDGGDGVFSEKKDDSRAAQDGSDPDKSPWPVSSALTARLRRLVTVYQRCNRKELCRPEILGPGNQGYWVQEEMFRRTSEMDLINKEAQKRWTRREQADFYRTVSSFGVVYDQEKKTFDWTQFRIISRLDKKSDESLEQYFYSFVAMCRNVCRLPTWKDGGPPDTTIYVEPITEERAARTLYRIELLRKVREQVLKCPQLHERLQLCRPSLYLPVWWECGKHDRDLLIGTAKHGLNRTDCYIMNDPQLSFLDAYRNYAQHKRSGTQAPGNLCCLYQTNSKLYESLTYSQMSRTSESLENEPENLVRVESRDDHLSLPDVTCENFISKVQDVISINHDESLLPESLESMMYGKKVLSQEPSSFQESPSTNTESRKDVITISISKDGNCQSGGPEAEIASGPTFMGSLEAGGVAQANIKNGKHLLMSISKEGELCCSEAGQRPENIGQLEAKCLASPSLNPGNESGFVDMCSLSVCDSKRNLSSDQQLIDLLENKSLESKLILSQNHSDEEEEEEENEEENLAMAVGMGERPEVLHLTEPTTNISREKNQGFQDETKKGSLEVANQTPGLQRAFPAPAACQCHCKHMERWMHGLENDEFEIEKPKAYIPDLFKSKTNTIAMEGEPTAIPSQPFKVKHELLKEPWKESAEGQNVFPTYPLEGSELKSEDMDFENKDDYDRDGNCHSQDYPGKYSEEESKSSTSGITGDIGDELQEARAPTIAQLLQEKTLYSFSEWPKDRVIINRLDNICHVVLKGKWPSSQQYEPSGTLPTPVLTSSAGSRTSLSEPEAAEHSFSNGAALAAQIHKESFLAPVFTKDEQKHRRPYEFEVERDAKARGLEQFSATHGHTPIILNGWHGESAMDLSCSSEGSPGATSPFPVSASTPKIGAISSLQGALGMDLSGILQAGLIHPVTGQIVNGSLRRDDAATRRRRGRRKHVEGGMDLIFLKEQTLQAGILEVHEDPGQATLSTTHPEGPGPATSAPEPATAASSQAEKSIPSKSLLDWLRQQADYSLEVPGFGANFSDKPKQRRPRCKEPGKLDVSSLSGEERVPAIPKEPGLRGFLPENKFNHTLAEPILRDTGPRRRGRRPRSELLKAPSIVADSPSGMGPLFMNGLIAGMDLVGLQNMRNMPGIPLTGLVGFPAGFATMPTGEEVKSTLSMLPMMLPGMAAVPQMFGVGGLLSPPMATTCTSTAPASLSSTTKSGTAVTEKTAEDKPSSHDVKTDTLAEDKPGPGPFSDQSEPAITTSSPVAFNPFLIPGVSPGLIYPSMFLSPGMGMALPAMQQARHSEIVGLESQKRKKKKTKGDNPNSHPEPAPSCEREPSGDENCAEPSAPLPAEREHGAQAGEGALKDSNNDTN

SEQ ID NO: 349 - protein, 1948 aa, Homo sapiens
MAPTWGPGMVSVVGPMGLLVVLLVGGCAAEEPPRFIKEPKDQIGVSGGVASFVCQATGDPKPRVTWNKKGKKVNSQRFETIEFDESAGAVLRIQPLRTPRDENVYECVAQNSVGEITVHAKLTVLREDQLPSGFPNIDMGPQLKVVERTRTATMLCAASGNPDPEITWFKDFLPVDPSASNGRIKQLRSETFESTPIRGALQIESSEETDQGKYECVATNSAGVRYSSPANLYVRELREVRRVAPRFSILPMSHEIMPGGNVNITCVAVGSPMPYVKWMQGAEDLTPEDDMPVGRNVLELTDVKDSANYTCVAMSSLGVIEAVAQITVKSLPKAPGTPMVTENTATSITITWDSGNPDPVSYYVIEYKSKSQDGPYQIKEDITTTRYSIGGLSPNSEYEIWVSAVNSIGQGPPSESVVTRTGEQAPASAPRNVQARMLSATTMIVQWEEPVEPNGLIRGYRVYYTMEPEHPVGNWQKHNVDDSLLTTVGSLLEDETYTVRVLAFTSVGDGPLSDPIQVKTQQGVPGQPMNLRAEARSETSITLSWSPPRQESIIKYELLFREGDHGREVGRTFDPTTSYVVEDLKPNTEYAFRLAARSPQGLGAFTPVVRQRTLQSKPSAPPQDVKCVSVRSTAILVSWRPPPPETHNGALVGYSVRYRPLGSEDPEPKEVNGIPPTTTQILLEALEKWTQYRITTVAHTEVGPGPESSPVVVRTDEDVPSAPPRKVEAEALNATAIRVLWRSPAPGRQHGQIRGYQVHYVRMEGAEARGPPRIKDVMLADAQWETDDTAEYEMVITNLQPETAYSITVAAYTMKGDGARSKPKVVVTKGAVLGRPTLSVQQTPEGSLLARWEPPAGTAEDQVLGYRLQFGREDSTPLATLEFPPSEDRYTASGVHKGATYVFRLAARSRGGLGEEAAEVLSIPEDTPRGHPQILEAAGNASAGTVLLRWLPPVPAERNGAIVKYTVAVREAGALGPARETELPAAAEPGAENALTLQGLKPDTAYDLQVRAHTRRGPGPFSPPVRYRTFLRDQVSPKNFKVKMIMKTSVLLSWEFPDNYNSPTPYKIQYNGLTLDVDGRTTKKLITHLKPHTFYNFVLTNRGSSLGGLQQTVTAWTAFNLLNGKPSVAPKPDADGFIMVYLPDGQSPVPVQSYFIVMVPLRKSRGGQFLTPLGSPEDMDLEELIQDISRLQRRSLRHSRQLEVPRPYIAARFSVLPPTFHPGDQKQYGGFDNRGLEPGHRYVLFVLAVLQKSEPTFAASPFSDPFQLDNPDPQPIVDGEEGLIWVIGPVLAVVFIICIVIAILLYKNKPDSKRKDSEPRTKCLLNNADLAPHHPKDPVEMRRINFQTPDSGLRSPLREPGFHFESMLSHPPIPIADMAEHTERLKANDSLKLSQEYESIDPGQQFTWEHSNLEVNKPKNRYANVIAYDHSRVILQPIEGIMGSDYINANYVDGYRCQNAYIATQGPLPETFGDFWRMVWEQRSATIVMMTRLEEKSRIKCDQYWPNRGTETYGFIQVTLLDTIELATFCVRTFSLHKNGSSEKREVRQFQFTAWPDHGVPEYPTPFLAFLRRVKTCNPPDAGPIVVHCSAGVGRTGCFIVIDAMLERIKPEKTVDVYGHVTLMRSQRNYMVQTEDQYSFIHEALLEAVGCGNTEVPARSLYAYIQKLAQVEPGEHVTGMELEFKRLANSKAHTSRFISANLPCNKFKNRLVNIMPYESTRVCLQPIRGVEGSDYINASFIDGYRQQKAYIATQGPLAETTEDFWRMLWENNSTIVVMLTKLREMGREKCHQYWPAERSARYQYFVVDPMAEYNMPQYILREFKVTDARDGQSRTVRQFQFTDWPEQGVPKSGEGFIDFIGQVHKTKEQFGQDGPISVHCSAGVGRTGVFITLSIVLERMRYEGVVDIFQTVKMLRTQRPAMVQTEDEYQFCYQAALEYLGSFDHYAT

SEQ ID NO: 350 - protein, 1366 aa, Homo sapiens
MLSFVDTRTLLLLAVTLCLATCQSLQEETVRKGPAGDRGPRGERGPPGPPGRDGEDGPTGPPGPPGPPGPPGLGGNFAAQYDGKGVGLGPGPMGLMGPRGPPGAAGAPGPQGFQGPAGEPGEPGQTGPAGARGPAGPPGKAGEDGHPGKPGRPGERGVVGPQGARGFPGTPGLPGFKGIRGHNGLDGLKGQPGAPGVKGEPGAPGENGTPGQTGARGLPGERGRVGAPGPAGARGSDGSVGPVGPAGPIGSAGPPGFPGAPGPKGEIGAVGNAGPAGPAGPRGEVGLPGLSGPVGPPGNPGANGLTGAKGAAGLPGVAGAPGLPGPRGIPGPVGAAGATGARGLVGEPGPAGSKGESGNKGEPGSAGPQGPPGPSGEEGKRGPNGEAGSAGPPGPPGLRGSPGSRGLPGADGRAGVMGPPGSRGASGPAGVRGPNGDAGRPGEPGLMGPRGLPGSPGNIGPAGKEGPVGLPGIDGRPGPIGPAGARGEPGNIGFPGPKGPTGDPGKNGDKGHAGLAGARGAPGPDGNNGAQGPPGPQGVQGGKGEQGPPGPPGFQGLPGPSGPAGEVGKPGERGLHGEFGLPGPAGPRGERGPPGESGAAGPTGPIGSRGPSGPPGPDGNKGEPGVVGAVGTAGPSGPSGLPGERGAAGIPGGKGEKGEPGLRGEIGNPGRDGARGAPGAVGAPGPAGATGDRGEAGAAGPAGPAGPRGSPGERGEVGPAGPNGFAGPAGAAGQPGAKGERGAKGPKGENGVVGPTGPVGAAGPAGPNGPPGPAGSRGDGGPPGMTGFPGAAGRTGPPGPSGISGPPGPPGPAGKEGLRGPRGDQGPVGRTGEVGAVGPPGFAGEKGPSGEAGTAGPPGTPGPQGLLGAPGILGLPGSRGERGLPGVAGAVGEPGPLGIAGPPGARGPPGAVGSPGVNGAPGEAGRDGNPGNDGPPGRDGQPGHKGERGYPGNIGPVGAAGAPGPHGPVGPAGKHGNRGETGPSGPVGPAGAVGPRGPSGPQGIRGDKGEPGEKGPRGLPGLKGHNGLQGLPGIAGHHGDQGAPGSVGPAGPRGPAGPSGPAGKDGRTGHPGTVGPAGIRGPQGHQGPAGPPGPPGPPGPPGVSGGGYDFGYDGDFYRADQPRSAPSLRPKDYEVDATLKSLNNQIETLLTPEGSRKNPARTCRDLRLSHPEWSSGYYWIDPNQGCTMDAIKVYCDFSTGETCIRAQPENIPAKNWYRSSKDKKHVWLGETINAGSQFEYNVEGVTSKEMATQLAFMRLLANYASQNITYHCKNSIAYMDEETGNLKKAVILQGSNDVELVAEGNSRFTYTVLVDGCSKKTNEWGKTIIEYKTNKPSRLPFLDIAPLDIGGADQEFFVDIGPVCFK

SEQ ID NO: 351 - protein, 2346 aa, Homo sapiens
MDEPSPLAQPLELNQHSRFIIGSVSEDNSEDEISNLVKLDLLEEKEGSLSPASVGSDTLSDLGISSLQDGLALHIRSSMSGLHLVKQGRDRKKIDSQRDFTVASPAEFVTRFGGNKVIEKVLIANNGIAAVKCMRSIRRWSYEMFRNERAIRFVVMVTPEDLKANAEYIKMADHYVPVPGGPNNNNYANVELILDIAKRIPVQAVWAGWGHASENPKLPELLLKNGIAFMGPPSQAMWALGDKIASSIVAQTAGIPTLPWSGSGLRVDWQENDFSKRILNVPQELYEKGYVKDVDDGLQAAEEVGYPVMIKASEGGGGKGIRKVNNADDFPNLFRQVQAEVPGSPIFVMRLAKQSRHLEVQILADQYGNAISLFGRDCSVQRRHQKIIEEAPATIATPAVFEHMEQCAVKLAKMVGYVSAGTVEYLYSQDGSFYFLELNPRLQVEHPCTEMVADVNLPAAQLQIAMGIPLYRIKDIRMMYGVSPWGDSPIDFEDSAHVPCPRGHVIAARITSENPDEGFKPSSGTVQELNFRSNKNVWGYFSVAAAGGLHEFADSQFGHCFSWGENREEAISNMVVALKELSIRGDFRTTVEYLIKLLETESFQMNRIDTGWLDRLIAEKVQAERPDTMLGVVCGALHVADVSLRNSVSNFLHSLERGQVLPAHTLLNTVDVELIYEGVKYVLKVTRQSPNSYVVIMNGSCVEVDVHRLSDGGLLLSYDGSSYTTYMKEEVDRYRITIGNKTCVFEKENDPSVMRSPSAGKLIQYIVEDGGHVFAGQCYAEIEVMKMVMTLTAVESGCIHYVKRPGAALDPGCVLAKMQLDNPSKVQQAELHTGSLPRIQSTALRGEKLHRVFHYVLDNLVNVMNGYCLPDPFFSSKVKDWVERLMKTLRDPSLPLLELQDIMTSVSGRIPPNVEKSIKKEMAQYASNITSVLCQFPSQQIANILDSHAATLNRKSEREVFFMNTQSIVQLVQRYRSGIRGHMKAVVMDLLRQYLRVETQFQNGHYDKCVFALREENKSDMNTVLNYIFSHAQVTKKNLLVTMLIDQLCGRDPTLTDELLNILTELTQLSKTTNAKVALRARQVLIASHLPSYELRHNQVESIFLSAIDMYGHQFCIENLQKLILSETSIFDVLPNFFYHSNQVVRMAALEVYVRRAYIAYELNSVQHRQLKDNTCVVEFQFMLPTSHPNRGNIPTLNRMSFSSNLNHYGMTHVASVSDVLLDNSFTPPCQRMGGMVSFRTFEDFVRIFDEVMGCFSDSPPQSPTFPEAGHTSLYDEDKVPRDEPIHILNVAIKTDCDIEDDRLAAMFREFTQQNKATLVDHGIRRLTFLVAQKDFRKQVNYEVDRRFHREFPKFFTFRARDKFEEDRIYRHLEPALAFQLELNRMRNFDLTAIPCANHKMHLYLGAAKVEVGTEVTDYRFFVRAIIRHSDLVTKEASFEYLQNEGERLLLEAMDELEVAFNNTNVRTDCNHIFLNFVPTVIMDPSKIEESVRSMVMRYGSRLWKLRVLQAELKINIRLTPTGKAIPIRLFLTNESGYYLDISLYKEVTDSRTAQIMFQAYGDKQGPLHGMLINTPYVTKDLLQSKRFQAQSLGTTYIYDIPEMFRQSLIKLWESMSTQAFLPSPPLPSDMLTYTELVLDDQGQLVHMNRLPGGNEIGMVAWKMTFKSPEYPEGRDIIVIGNDITYRIGSFGPQEDLLFLRASELARAEGIPRIYVSANSGARIGLAEEIRHMFHVAWVDPEDPYKGYRYLYLTPQDYKRVSALNSVHCEHVEDEGESRYKITDIIGKEEGIGPENLRGSGMIAGESSLAYNEIITISLVTCRAIGIGAYLVRLGQRTIQVENSHLILTGAGALNKVLGREVYTSNNQLGGIQIMHNNGVTHCTVCDDFEGVFTVLHWLSYMPKSVHSSVPLLNSKDPIDRIIEFVPTKTPYDPRWMLAGRPHPTQKGQWLSGFFDYGSFSEIMQPWAQTVVVGRARLGGIPVGVVAVETRTVELSIPADPANLDSEAKIIQQAGQVWFPDSAFKTYQAIKDFNREGLPLMVFANWRGFSGGMKDMYDQVLKFGAYIVDGLRECCQPVLVYIPPQAELRGGSWVVIDSSINPRHMEMYADRESRGSVLEPEGTVEIKFRRKDLVKTMRRVDPVYIHLAERLGTPELSTAERKELENKLKEREEFLIPIYHQVAVQFADLHDTPGRMQEKGVISDILDWKTSRTFFYWRLRRLLLEDLVKKKIHNANPELTDGQIQAMLRRWFVEVEGTVKAYVWDNNKDLAEWLEKQLTEEDGVHSVIEENIKCISRDYVLKQIRSLVQANPEVAMDSIIHMTQHISPTQRAEVIRILSTMDSPST

SEQ ID NO: 352 - protein, 1997 aa, Homo sapiens
MALLIHLKTVSELRGRGDRIAKVTFRGQSFYSRVLENCEDVADFDETFRWPVASSIDRNEMLEIQVFNYSKVFSNKLIGTFRMVLQKVVEESHVEVTDTLIDDNNAIIKTSLCVEVRYQATDGTVGSWDDGDFLGDESLQEEEKDSQETDGLLPGSRPSSRPPGEKSFRRAGRSVFSAMKLGKNRSHKEEPQRPDEPAVLEMEDLDHLAIRLGDGLDPDSVSLASVTALTTNVSNKRSKPDIKMEPSAGRPMDYQVSITVIEARQLVGLNMDPVVCVEVGDDKKYTSMKESTNCPYYNEYFVFDFHVSPDVMFDKIIKISVIHSKNLLRSGTLVGSFKMDVGTVYSQPEHQFHHKWAILSDPDDISSGLKGYVKCDVAVVGKGDNIKTPHKANETDEDDIEGNLLLPEGVPPERQWARFYVKIYRAEGLPRMNTSLMANVKKAFIGENKDLVDPYVQVFFAGQKGKTSVQKSSYEPLWNEQVVFTDLFPPLCKRMKVQIRDSDKVNDVAIGTHFIDLRKISNDGDKGFLPTLGPAWVNMYGSTRNYTLLDEHQDLNEGLGEGVSFRARLLLGLAVEIVDTSNPELTSSTEVQVEQATPISESCAGKMEEFFLFGAFLEASMIDRRNGDKPITFEVTIGNYGNEVDGLSRPQRPRPRKEPGDEEEVDLIQNASDDEAGDAGDLASVSSTPPMRPQVTDRNYFHLPYLERKPCIYIKSWWPDQRRRLYNANIMDHIADKLEEGLNDIQEMIKTEKSYPERRLRGVLEELSCGCCRFLSLADKDQGHSSRTRLDRERLKSCMRELENMGQQARMLRAQVKRHTVRDKLRLCQNFLQKLRFLADEPQHSIPDIFIWMMSNNKRVAYARVPSKDLLFSIVEEETGKDCAKVKTLFLKLPGKRGFGSAGWTVQAKVELYLWLGLSKQRKEFLCGLPCGFQEVKAAQGLGLHAFPPVSLVYTKKQAFQLRAHMYQARSLFAADSSGLSDPFARVFFINQSQCTEVLNETLCPTWDQMLVFDNLELYGEAHELRDDPPIIVIEIYDQDSMGKADFMGRTFAKPLVKMADEAYCPPRFPPQLEYYQIYRGNATAGDLLAAFELLQIGPAGKADLPPINGPVDVDRGPIMPVPMGIRPVLSKYRVEVLFWGLRDLKRVNLAQVDRPRVDIECAGKGVQSSLIHNYKKNPNFNTLVKWFEVDLPENELLHPPLNIRVVDCRAFGRYTLVGSHAVSSLRRFIYRPPDRSAPSWNTTVRLLRRCRVLCNGGSSSHSTGEVVVTMEPEVPIKKLETMVKLDATSEAVVKVDVAEEEKEKKKKKKGTAEEPEEEEPDESMLDWWSKYFASIDTMKEQLRQQEPSGIDLEEKEEVDNTEGLKGSMKGKEKARAAKEEKKKKTQSSGSGQGSEAPEKKKPKIDELKVYPKELESEFDNFEDWLHTFNLLRGKTGDDEDGSTEEERIVGRFKGSLCVYKVPLPEDVSREAGYDSTYGMFQGIPSNDPINVLVRVYVVRATDLHPADINGKADPYIAIRLGKTDIRDKENYISKQLNPVFGKSFDIEASFPMESMLTVAVYDWDLVGTDDLIGETKIDLENRFYSKHRATCGIAQTYSTHGYNIWRDPMKPSQILTRLCKDGKVDGPHFGPPGRVKVANRVFTGPSEIEDENGQRKPTDEHVALLALRHWEDIPRAGCRLVPEHVETRPLLNPDKPGIEQGRLELWVDMFPMDMPAPGTPLDISPRKPKKYELRVIIWNTDEVVLEDDDFFTGEKSSDIFVRGWLKGQQEDKQDTDVHYHSLTGEGNFNWRYLFPFDYLAAEEKIVISKKESMFSWDETEYKIPARLTLQIWDADHFSADDFLGAIELDLNRFPRGAKTAKQCTMEMATGEVDVPLVSIFKQKRVKGWWPLLARNENDEFELTGKVEAELHLLTAEEAEKNPVGLARNEPDPLEKPNRPDTSFIWFLNPLKSARYFLWHTYRWLLLKLLLLLLLLLLLALFLYSVPGYLVKKILGA

SEQ ID NO: 353 - protein, 5147 aa, Homo sapiens
MLLPALLFGMAWALADGRWCEWTETIRVEEEVAPRQEDLVPCASLDHYSRLGWRLDLPWSGRSGLTRSPAPGLCPIYKPPETRPAKWNRTVRTCCPGWGGAHCTEALAKASPEGHCFAMWQCQLQAGSANASAGSLEECCARPWGQSWWDGSSQACRSCSSRHLPGSASSPALLQPLAGAVGQLWSQHQRPSATCASWSGFHYRTFDGRHYHFLGRCTYLLAGAADSTWAVHLTPGDRCPQPGHCQRVTMGPEEVLIQAGNVSVKGQLVPEGQSWLLHGLSLQWLGDWLVLSGGLGVVVRLDRTGSISISVDHELWGQTQGLCGLYNGWPEDDFMEPGGGLAMLAATFGNSWRLPGSESGCLDAVEVAQGCDPLGLIDADVEPGHLRAEAQDVCHQLLEGPFGQCHAQVSPAEYHEACLFAYCAGAMAGSGQEGRQQAVCATFASYVQACARRHIHIRWRKPGFCERLCPGGQLYSDCVSLCPPSCEAVGQGEEESCREECVSGCECPRGLFWNGTLCVPAAHCPCYYCRQRYVPGDTVRQLCNPCVCRDGRWHCAQALCPAECAVGGDGHYLTFDGRSYSFWGGQGCRYSLVQDYVKGQLLILLEHGACDAGSCLHAISVSLEDTHIQLRDSGAVLVNGQDVGLPWIGAEGLSVRRASSAFLLLRWPGAQVLWGLSDPVAYITLDPRHAHQVQGLCGTFTQNQQDDFLTPAGDVETSIAAFASKFQVAGKGRCPSEDSALLSPCTTHSQRHAFAEAACAILHSSVFQECHRLVDKEPFYLRCLAAVCGCDPGSDCLCPVLSAYARRCAQEGASPPWRNQTLCPVMCPGGQEYRECAPACGQHCGKPEDCGELGSCVAGCNCPLGLLWDPEGQCVPPSLCPCQLGARRYAPGSATMKECNRCICQERGLWNCTARHCPSQAFCPRELVYAPGACLLTCDSPSANHSCPAGSTDGCVCPPGTVLLDERCVPPDLCPCRHSGQWYLPNATIQEDCNVCVCRGRQWHCTGQRRSGRCQASGAPHYVTFDGLAFTYPGACEYLLVREASGLFTVSAQNLPCGASGLTCTKALAVRLEGTVVHMLRGRAVTVNGVSVTPPKVYTGPGLSLRRAGLFLLLSTHLGLTLLWDGGTRVLVQLSPQFRGRVAGLCGDFDGDASNDLRSRQGVLEPTAELAAHSWRLSPLCPEPGDLPHPCTMNTHRAGWARARCGALLQPLFTLCHAEVPPQQHYEWCLYDACGCDSGGDCECLCSAIATYADECARHGHHVRWRSQELCSLQCEGGQVYEACGPTCPPTCHEQHPEPGWHCQVVACVEGCFCPEGTLLHGGACLEPASCPCEWGRNSFPPGSVLQKDCGNCTCQEGQWHCGGDGGHCEELVPACAEGEALCQENGHCVPHGWLCDNQDDCGDGSDEEGCAAPGCGEGQMTCSSGHCLPLALLCDRQDDCGDGTDEPSYPCPQGLLACADGRCLPPALLCDGHPDCLDAADEESCLGQVTCVPGEVSCVDGTCLGAIQLCDGVWDCPDGADEGPGHCPLPSLPTPPASTLPGPSPGSLDTASSPLASASPAPPCGPFEFRCGSGECTPRGWRCDQEEDCADGSDERGCGGPCAPHHAPCARGPHCVSPEQLCDGVRQCPDGSDEGPDACGGLPALGGPNRTGLPCPEYTCPNGTCIGFQLVCDGQPDCGRPGQVGPSPEEQGCGAWGPWSPWGPCSRTCGPWGQGRSRRCSPLGLLVLQNCPGPEHQSQACFTAACPVDGEWSTWSPWSVCSEPCRGTMTRQRQCHSPQNGGRTCAALPGGLHSTRQTKPCPQDGCPNATCSGELMFQPCAPCPLTCDDISGQVTCPPDWPCGSPGCWCPEGQVLGSEGWCVWPRQCPCLVDGARYWPGQRIKADCQLCICQDGRPRRCRLNPDCAVDCGWSSWSPWAKCLGPCGSQSIQWSFRSSNNPRPSGRGRQCRGIHRKARRCQTEPCEGCEHQGQVHRVGERWHGGPCRVCQCLHNLTAHCSPYCPLGSCPQGWVLVEGTGESCCHCALPGENQTVQPMATPAAAPAPSPQIRFPLATYILPPSGDPCYSPLGLAGLAEGSLHASSQQLEHPTQAALLGAPTQGPSPQGWHAGGDAYAKWHTRPHYLQLDLLQPRNLTGILVPETGSSNAYASSFSLQFSSNGLHWHDYRDLLPGILPLPKLFPRNWDDLDPAVWTFGRMVQARFVRVWPHDVHHSDVPLQVELLGCEPGSPPAPLCPGVGLRCASGECVLRGGPCDGVLDCEDGSDEEGCVLLPEGTGRFHSTAKTLALSSAQPGQLLHWPREGLAETEHWPPGQESPTSPTETRPVSPGPASGVPHHGESVQMVTTTPIPQMEARTLPPGMAAVTVVPPHPVTPATPAGQSVAPGPFPPVQCGPGQTPCEVLGCVEQAQVCDGREDCLDGSDERHCARNLLMWLPSLPALWAASTVPFMMPTMALPGLPASRALCSPSQLSCGSGECLSAERRCDLRPDCQDGSDEDGCVDCVLAPWSVWSSCSRSCGLGLTFQRQELLRPPLPGGSCPRDRFRSQSCFVQACPVAGAWAMWEAWGPCSVSCGGGHQSRQRSCVDPPPKNGGAPCPGASQERAPCGLQPCSGGTDCELGRVYVSADLCQKGLVPPCPPSCLDPKANRSCSGHCVEGCRCPPGLLLHDTRCLPLSECPCLVGEELKWPGVSFLLGNCSQCVCEKGELLCQPGGCPLPCGWSAWSSWAPCDRSCGSGVRARFRSPSNPPAAWGGAPCEGDRQELQGCHTVCGTEVFGWTPWTSWSSCSQSCLAPGGGPGWRSRSRLCPSPGDSSCPGDATQEEPCSPPVCPVPSIWGLWAPWSTCSAPCDGGIQTRGRSCSSLAPGDTTCPGPHSQTRDCNTQPCTAQCPENMLFRSAEQCHQEGGPCPRLCLTQGPGIECTGFCAPGCTCPPGLFLHNASCLPRSQCPCQLHGQLYASGAMARLDSCNNCTCVSGKMACTSERCPVACGWSPWTLWSLCSCSCNVGIRRRFRAGTAPPAAFGGAECQGPTMEAEFCSLRPCPGPGGEWGPWSPCSVPCGGGYRNRTRGSSRSLMEFSTCGLQPCAGPVPGMCPRDKQWLDCAQGPASCAELSAPRGTNQTCHPGCHCPSGMLLLNNVCVPTQDCPCAHEGHLYPPGSTVVRPCENCSCVSGLIANCSSWPCAEGEPTWSPWTPWSQCSASCGPARCHRHRFCARSPSAVPSTVAPLPLPATPTPLCSGPEAEEEPCLLQGCDRAGGWGPWGPWSHCSRSCGGGLRSRTRACDQPPPQGLGDYCEGPRAQGEVCQALPCPVTNCTAIEGAEYSPCGPPCPRSCDDLVHCVWRCQPGCYCPPGQVLSSNGAICVQPGHCSCLDLLTGQRHHPGARLARPDGCNHCTCLEGRLNCTDLPCPVPGGWCPWSEWTMCSQPCRGQTRSRSRACACPTPQHGGAPCTGEAGEAGAQHQREACPSYATCPVDGAWGPWGPWSPCDMCLGQSHRSRACSRPPTPEGGRPCPGNHTQSRPCQENSTQCTDCGGGQSLHPCGQPCPRSCQDLSPGSVCQPGSVGCQPTCGCPLGQLSQDGLCVPPAHCRCQYQPGAMGIPENQSRSAGSRFSSWESLEPGEVVTGPCDNCTCVAGILQCQEVPDCPDPGVWSSWGPWEDCSVSCGGGEQLRSRRCARPPCPGPARQSRTCSTQVCREAGCPAGRLYRECQPGEGCPFSCAHVTQQVGCFSEGCEEGCHCPEGTFQHRLACVQECPCVLTAWLLQELGATIGDPGQPLGPGDELDSGQTLRTSCGNCSCAHGKLSCSLDDCFEADGGFGPWSPWGPCSRSCGGLGTRTRSRQCVLTMPTLSGQGCRGPRQDLECPSPDCPGAEGSTVEPVTGLPGGWGPWSSWSPCSRSCTDPARPAWRSRTRLCLANCTMGDPLQERPCNLPSCTELPVCPGPGCGAGNCSWTSWAPWEPCSRSCGVGQQRRLRAYRPPGPGGHWCPNILTAYQERRFCNLRACPVPGGWSRWSPWSWCDRSCGGGQSLRSRSCSSPPSKNGGAPCAGERHQARLCNPMPCEAGCPAGMEVVTCANRCPRRCSDLQEGIVCQDDQVCQKGCRCPKGSLEQDGGCVPIGHCDCTDAQGHSWAPGSQHQDACNNCSCQAGQLSCTAQPCPPPTHCAWSHWSAWSPCSHSCGPRGQQSRFRSSTSGSWAPECREEQSQSQPCPQPSCPPLCLQGTRSRTLGDSWLQGECQRCSCTPEGVICEDTECAVPEAWTLWSSWSDCPVSCGGGNQVRTRACRAAAPHHRSPPCLGPDTQTRQQPCPGLLEACSWGPWGPCSRSCGPGLASRSGSCPCLMAKADPTCNSTFLHLDTQGCYSGPCPEECVWSSWSSWTRCSCRVLVQQRYRHQGPASRGARAGAPCTRLDGHFRPCLISNCSEDSCTPPFEFHACGSPCAGLCATHLSHQLCQDLPPCQPGCYCPKGLLEQAGGCIPPEECNCWHTSAAGAGMTLAPGDRLQLGCKECECRRGELHCTSQGCQGLLPLSEWSEWSPCGPCLPPSALAPASRTALEEHWLRDPTGLSPTLAPLLASEQHRHRLCLDPATGRPWTGAPHLCTAPLSQQRLCPDPGACPDSCQWSLWGPWSPCQVPCSGGFRLRWREAEALCGGGCREPWAQESCNGGPCPECEAQDTVFTLDCANQCPHSCADLWDRVQCLQGPCRPGCRCPPGQLVQDGRCVPISSCRCGLPSANASWELAPAQAVQLDCQNCTCVNESLVCPHQECPVLGPWSAWSSCSAPCGGGTMERHRTCEGGPGVAPCQAQDTEQRQECNLQPCPECPPGQVLSACATSCPCLCWHLQPGAICVQEPCQPGCGCPGGQLLHNGTCVPPTACPCTQHSLPWGLTLTLEEQAQELPPGTVLTRNCTRCVCHGGAFSCSLVDCQVPPGETWQQVAPGELGLCEQTCLEMNATKTQSNCSSARASGCVCQPGHFRSQAGPCVPEDHCECWHLGRPHLPGSEWQEACESCLCLSGRPVCTQHCSPLTCAQGEEMVLEPGSCCPSCRREAPEEQSPSCQLLTELRNFTKGTCYLDQVEVSYCSGYCPSSTHVMPEEPYLQSQCDCCSYRLDPESPVRILNLRCLGGHTEPVVLPVIHSCQCSSCQGGDFSKR

SEQ ID NO: 354 - protein, 2115 aa, Homo sapiens
MTLHATRGAALLSWVNSLHVADPVEAVLQLQDCSIFIKIIDRIHGTEEGQQILKQPVSERLDFVCSFLQKNRKHPSSPECLVSAQKVLEGSELELAKMTMLLLYHSTMSSKSPRDWEQFEYKIQAELAVILKFVLDHEDGLNLNEDLENFLQKAPVPSTCSSTFPEELSPPSHQAKREIRFLELQKVASSSSGNNFLSGSPASPMGDILQTPQFQMRRLKKQLADERSNRDELELELAENRKLLTEKDAQIAMMQQRIDRLALLNEKQAASPLEPKELEELRDKNESLTMRLHETLKQCQDLKTEKSQMDRKINQLSEENGDLSFKLREFASHLQQLQDALNELTEEHSKATQEWLEKQAQLEKELSAALQDKKCLEEKNEILQGKLSQLEEHLSQLQDNPPQEKGEVLGDVLQLETLKQEAATLAANNTQLQARVEMLETERGQQEAKLLAERGHFEEEKQQLSSLITDLQSSISNLSQAKEELEQASQAHGARLTAQVASLTSELTTLNATIQQQDQELAGLKQQAKEKQAQLAQTLQQQEQASQGLRHQVEQLSSSLKQKEQQLKEVAEKQEATRQDHAQQLATAAEEREASLRERDAALKQLEALEKEKAAKLEILQQQLQVANEARDSAQTSVTQAQREKAELSRKVEELQACVETARQEQHEAQAQVAELELQLRSEQQKATEKERVAQEKDQLQEQLQALKESLKVTKGSLEEEKRRAADALEEQQRCISELKAETRSLVEQHKRERKELEEERAGRKGLEARLQQLGEAHQAETEVLRRELAEAMAAQHTAESECEQLVKEVAAWRERYEDSQQEEAQYGAMFQEQLMTLKEECEKARQELQEAKEKVAGIESHSELQISRQQNELAELHANLARALQQVQEKEVRAQKLADDLSTLQEKMAATSKEVARLETLVRKAGEQQETASRELVKEPARAGDRQPEWLEEQQGRQFCSTQAALQAMEREAEQMGNELERLRAALMESQGQQQEERGQQEREVARLTQERGRAQADLALEKAARAELEMRLQNALNEQRVEFATLQEALAHALTEKEGKDQELAKLRGLEAAQIKELEELRQTVKQLKEQLAKKEKEHASGSGAQSEAAGRTEPTGPKLEALRAEVSKLEQQCQKQQEQADSLERSLEAERASRAERDSALETLQGQLEEKAQELGHSQSALASAQRELAAFRTKVQDHSKAEDEWKAQVARGRQEAERKNSLISSLEEEVSILNRQVLEKEGESKELKRLVMAESEKSQKLEERLRLLQAETASNSARAAERSSALREEVQSLREEAEKQRVASENLRQELTSQAERAEELGQELKAWQEKFFQKEQALSTLQLEHTSTQALVSELLPAKHLCQQLQAEQAAAEKRHREELEQSKQAAGGLRAELLRAQRELGELIPLRQKVAEQERTAQQLRAEKASYAEQLSMLKKAHGLLAEENRGLGERANLGRQFLEVELDQAREKYVQELAAVRADAETRLAEVQREAQSTARELEVMTAKYEGAKVKVLEERQRFQEERQKLTAQVEQLEVFQREQTKQVEELSKKLADSDQASKVQQQKLKAVQAQGGESQQEAQRLQAQLNELQAQLSQKEQAAEHYKLQMEKAKTHYDAKKQQNQELQEQLRSLEQLQKENKELRAEAERLGHELQQAGLKTKEAEQTCRHLTAQVRSLEAQVAHADQQLRDLGKFQVATDALKSREPQAKPQLDLSIDSLDLSCEEGTPLSITSKLPRTQPDGTSVPGEPASPISQRLPPKVESLESLYFTPIPARSQAPLESSLDSLGDVFLDSGRKTRSARRRTTQIINITMTKKLDVEEPDSANSSFYSTRSAPASQASLRATSSTQSLARLGSPDYGNSALLSLPGYRPTTRSSARRSQAGVSSGAPPGRNSFYMGTCQDEPEQLDDWNRIAELQQRNRVCPPHLKTCYPLESRPSLSLGTITDEEMKTGDPQETLRRASMQPIQIAEGTGITTRQQRKRVSLEPHQGPGTPESKKATSCFPRPMTPRDRHEGRKQSTTEAQKKAAPASTKQADRRQSMAFSILNTPKKLGNSLLRRGASKKALSKASPNTRSGTRRSPRIATTTASAATAAAIGATPRAKGKAKH

SEQ ID NO: 355 - protein, 3056 aa, Homo sapiens
MSLVLNDLLICCRQLEHDRATERKKEVEKFKRLIRDPETIKHLDRHSDSKQGKYLNWDAVFRFLQKYIQKETECLRIAKPNVSASTQASRQKKMQEISSLVKYFIKCANRRAPRLKCQELLNYIMDTVKDSSNGAIYGADCSNILLKDILSVRKYWCEISQQQWLELFSVYFRLYLKPSQDVHRVLVARIIHAVTKGCCSQTDGLNSKFLDFFSKAIQCARQEKSSSGLNHILAALTIFLKTLAVNFRIRVCELGDEILPTLLYIWTQHRLNDSLKEVIIELFQLQIYIHHPKGAKTQEKGAYESTKWRSILYNLYDLLVNEISHIGSRGKYSSGFRNIAVKENLIELMADICHQVFNEDTRSLEISQSYTTTQRESSDYSVPCKRKKIELGWEVIKDHLQKSQNDFDLVPWLQIATQLISKYPASLPNCELSPLLMILSQLLPQQRHGERTPYVLRCLTEVALCQDKRSNLESSQKSDLLKLWNKIWCITFRGISSEQIQAENFGLLGAIIQGSLVEVDREFWKLFTGSACRPSCPAVCCLTLALTTSIVPGTVKMGIEQNMCEVNRSFSLKESIMKWLLFYQLEGDLENSTEVPPILHSNFPHLVLEKILVSLTMKNCKAAMNFFQSVPECEHHQKDKEELSFSEVEELFLQTTFDKMDFLTIVRECGIEKHQSSIGFSVHQNLKESLDRCLLGLSEQLLNNYSSEITNSETLVRCSRLLVGVLGCYCYMGVIAEEEAYKSELFQKAKSLMQCAGESITLFKNKTNEEFRIGSLRNMMQLCTRCLSNCTKKSPNKIASGFFLRLLTSKLMNDIADICKSLASFIKKPFDRGEVESMEDDTNGNLMEVEDQSSMNLFNDYPDSSVSDANEPGESQSTIGAINPLAEEYLSKQDLLFLDMLKFLCLCVTTAQTNTVSFRAADIRRKLLMLIDSSTLEPTKSLHLHMYLMLLKELPGEEYPLPMEDVLELLKPLSNVCSLYRRDQDVCKTILNHVLHVVKNLGQSNMDSENTRDAQGQFLTVIGAFWHLTKERKYIFSVRMALVNCLKTLLEADPYSKWAILNVMGKDFPVNEVFTQFLADNHHQVRMLAAESINRLFQDTKGDSSRLLKALPLKLQQTAFENAYLKAQEGMREMSHSAENPETLDEIYNRKSVLLTLIAVVLSCSPICEKQALFALCKSVKENGLEPHLVKKVLEKVSETFGYRRLEDFMASHLDYLVLEWLNLQDTEYNLSSFPFILLNYTNIEDFYRSCYKVLIPHLVIRSHFDEVKSIANQIQEDWKSLLTDCFPKILVNILPYFAYEGTRDSGMAQQRETATKVYDMLKSENLLGKQIDHLFISNLPEIVVELLMTLHEPANSSASQSTDLCDFSGDLDPAPNPPHFPSHVIKATFAYISNCHKTKLKSILEILSKSPDSYQKILLAICEQAAETNNVYKKHRILKIYHLFVSLLLKDIKSGLGGAWAFVLRDVIYTLIHYINQRPSCIMDVSLRSFSLCCDLLSQVCQTAVTYCKDALENHLHVIVGTLIPLVYEQVEVQKQVLDLLKYLVIDNKDNENLYITIKLLDPFPDHVVFKDLRITQQKIKYSRGPFSLLEEINHFLSVSVYDALPLTRLEGLKDLRRQLELHKDQMVDIMRASQDNPQDGIMVKLVVNLLQLSKMAINHTGEKEVLEAVGSCLGEVGPIDFSTIAIQHSKDASYTKALKLFEDKELQWTFIMLTYLNNTLVEDCVKVRSAAVTCLKNILATKTGHSFWEIYKMTTDPMLAYLQPFRTSRKKFLEVPRFDKENPFEGLDDINLWIPLSENHDIWIKTLTCAFLDSGGTKCEILQLLKPMCEVKTDFCQTVLPYLIHDILLQDTNESWRNLLSTHVQGFFTSCLRHFSQTSRSTTPANLDSESEHFFRCCLDKKSQRTMLAVVDYMRRQKRPSSGTIFNDAFWLDLNYLEVAKVAQSCAAHFTALLYAEIYADKKSMDDQEKRSLAFEEGSQSTTISSLSEKSKEETGISLQDLLLEIYRSIGEPDSLYGCGGGKMLQPITRLRTYEHEAMWGKALVTYDLETAIPSSTRQAGIIQALQNLGLCHILSVYLKGLDYENKDWCPELEELHYQAAWRNMQWDHCTSVSKEVEGTSYHESLYNALQSLRDREFSTFYESLKYARVKEVEEMCKRSLESVYSLYPTLSRLQAIGELESIGELFSRSVTHRQLSEVYIKWQKHSQLLKDSDFSFQEPIMALRTVILEILMEKEMDNSQRECIKDILTKHLVELSILARTFKNTQLPERAIFQIKQYNSVSCGVSEWQLEEAQVFWAKKEQSLALSILKQMIKKLDASCAANNPSLKLTYTECLRVCGNWLAETCLENPAVIMQTYLEKAVEVAGNYDGESSDELRNGKMKAFLSLARFSDTQYQRIENYMKSSEFENKQALLKRAKEEVGLLREHKIQTNRYTVKVQRELELDELALRALKEDRKRFLCKAVENYINCLLSGEEHDMWVFRLCSLWLENSGVSEVNGMMKRDGMKIPTYKFLPLMYQLAARMGTKMMGGLGFHEVLNNLISRISMDHPHHTLFIILALANANRDEFLTKPEVARRSRITKNVPKQSSQLDEDRTEAANRIICTIRSRRPQMVRSVEALCDAYIILANLDATQWKTQRKGINIPADQPITKLKNLEDVVVPTMEIKVDHTGEYGNLVTIQSFKAEFRLAGGVNLPKIIDCVGSDGKERRQLVKGRDDLRQDAVMQQVFQMCNTLLQRNTETRKRKLTICTYKVVPLSQRSGVLEWCTGTVPIGEFLVNNEDGAHKRYRPNDFSAFQCQKKMMEVQKKSFEEKYEVFMDVCQNFQPVFRYFCMEKFLDPAIWFEKRLAYTRSVATSSIVGYILGLGDRHVQNILINEQSAELVHIDLGVAFEQGKILPTPETVPFRLTRDIVDGMGITGVEGVFRRCCEKTMEVMRNSQETLLTIVEVLLYDPLFDWTMNPLKALYLQQRPEDETELHPTLNADDQECKRNLSDIDQSFNKVAERVLMRLQEKLKGVEEGTVLSVGGQVNLLIQQAIDPKNLSRLFPGWKAWV

SEQ ID NO: 356 - protein, 1685 aa, Homo sapiens
MSLPFYQRCHQHYDLSYRNKDVRSTVSHYQREKKRSAVYTQGSTAYSSRSSAAHRRESEAFRRASASSSQQQASQHALSSEVSRKAASAYDYGSSHGLTDSSLLLDDYSSKLSPKPKRAKHSLLSGEEKENLPSDYMVPIFSGRQKHVSGITDTEEERIKEAAAYIAQRNLLASEEGITTSKQSTASKQTTASKQSTASKQSTASKQSTASRQSTASRQSVVSKQATSALQQEETSEKKSRKVVIREKAERLSLRKTLEETETYHAKLNEDHLLHAPEFIIKPRSHTVWEKENVKLHCSIAGWPEPRVTWYKNQVPINVHANPGKYIIESRYGMHTLEINGCDFEDTAQYRASAMNVKGELSAYASVVVKRYKGEFDETRFHAGASTMPLSFGVTPYGYASRFEIHFDDKFDVSFGREGETMSLGCRVVITPEIKHFQPEIQWYRNGVPLSPSKWVQTLWSGERATLTFSHLNKEDEGLYTIRVRMGEYYEQYSAYVFVRDADAEIEGAPAAPLDVKCLEANKDYIIISWKQPAVDGGSPILGYFIDKCEVGTDSWSQCNDTPVKFARFPVTGLIEGRSYIFRVRAVNKMGIGFPSRVSEPVAALDPAEKARLKSRPSAPWTGQIIVTEEEPSEGIVPGPPTDLSVTEATRSYVVLSWKPPGQRGHEGIMYFVEKCEAGTENWQRVNTELPVKSPRFALFDLAEGKSYCFRVRCSNSAGVGEPSEATEVTVVGDKLDIPKAPGKIIPSRNTDTSVVVSWEESKDAKELVGYYIEASVAGSGKWEPCNNNPVKGSRFTCHGLVTGQSYIFRVRAVNAAGLSEYSQDSEAIEVKAAIGGGVSPDVCPALSDEPGGLTASRGRVHEASPPTFQKDALLGSKPNKPSLPSSSQNLGQTEVSKVSETVQEELTPPPQKAAPQGKSKSDPLKKKTDRAPPSPPCDITCLESFRDSMVLGWKQPDKIGGAEITGYYVNYREVIDGVPGKWREANVKAVSEEAYKISNLKENMVYQFQVAAMNMAGLGAPSAVSECFKCEEWTIAVPGPPHSLKCSEVRKDSLVLQWKPPVHSGRTPVTGYFVDLKEAKAKEDQWRGLNEAAIKNVYLKVRGLKEGVSYVFRVRAINQAGVGKPSDLAGPVVAETRPGTKEVVVNVDDDGVISLNFECDKMTPKSEFSWSKDYVSTEDSPRLEVESKGNKTKMTFKDLGMDDLGIYSCDVTDTDGIASSYLIDEEELKRLLALSHEHKFPTVPVKSELAVEILEKGQVRFWMQAEKLSGNAKVNYIFNEKEIFEGPKYKMHIDRNTGIIEMFMEKLQDEDEGTYTFQLQDGKATNHSTVVLVGDVFKKLQKEAEFQRQEWIRKQGPHFVEYLSWEVTGECNVLLKCKVANIKKETHIVWYKDEREISVDEKHDFKDGICTLLITEFSKKDAGIYEVILKDDRGKDKSRLKLVDEAFKELMMEVCKKIALSATDLKIQSTAEGIQLYSFVTYYVEDLKVNWSHNGSAIRYSDRVKTGVTGEQIWLQINEPTPNDKGKYVMELFDGKTGHQKTVDLSGQAYDEAYAEFQRLKQAAIAEKNRARVLGGLPDVVTIQEGKALNLTCNVWGDPPPEVSWLKNEKALASDDHCNLKFEAGRTAYFTINGVSTADSGKYGLVVKNKYGSETSDFTVSVFIPEEEARMAALESLKGGKKAK

SEQ ID NO: 357 - protein, 1946 aa, Homo sapiens
MVESCLLTFRAFFWWIALIKMDLSDLGEAAAFLRRSEAELLLLQATALDGKKKCWIPDGENAYIEAEVKGSEDDGTVIVETADGESLSIKEDKIQQMNPPEFEMIEDMAMLTHLNEASVLHTLKRRYGQWMIYTYSGLFCVTINPYKWLPVYQKEVMAAYKGKRRSEAPPHIFAVANNAFQDMLHNRENQSILFTGESGAGKTVNSKHIIQYFATIAAMIESRKKQGALEDQIMQANTILEAFGNAKTLRNDNSSRFGKFIRMHFGARGMLSSVDIDIYLLEKSRVIFQQAGERNYHIFYQILSGQKELHDLLLVSANPSDFHFCSCGAVTVESLDDAEELLATEQAMDILGFLPDEKYGCYKLTGAIMHFGNMKFKQKPREEQLEADGTENADKAAFLMGINSSELVKCLIHPRIKVGNEYVTRGQTIEQVTCAVGALSKSMYERMFKWLVARINRALDAKLSRQFFIGILDITGFEILEYNSLEQLCINFTNEKLQQFFNWHMFVLEQEEYKKESIEWVSIGFGLDLQACIDLIEKPMGILSILEEECMFPKATDLTFKTKLFDNHFGKSVHLQKPKPDKKKFEAHFELVHYAGVVPYNISGWLEKNKDLLNETVVAVFQKSSNRLLASLFENYMSTDSAIPFGEKKRKKGASFQTVASLHKENLNKLMTNLKSTAPHFVRCINPNVNKIPGILDPYLVLQQLRCNGVLEGTRICREGFPNRLQYADFKQRYCILNPRTFPKSKFVSSRKAAEELLGSLEIDHTQYRFGITKVFFKAGFLGQLEAIRDERLSKVFTLFQARAQGKLMRIKFQKILEERDALILIQWNIRAFMAVKNWPWMRLFFKIKPLVKSSEVGEEVAGLKEECAQLQKALEKSEFQREELKAKQVSLTQEKNDLILQLQAEQETLANVEEQCEWLIKSKIQLEARVKELSERVEEEEEINSELTARGRKLEDECFELKKEIDDLETMLVKSEKEKRTTEHKVKNLTEEVEFLNEDISKLNRAAKVVQEAHQQTLDDLHMEEEKLSSLSKANLKLEQQVDELEGALEQERKARMNCERELHKLEGNLKLNRESMENLESSQRHLAEELRKKELELSQMNSKVENEKGLVAQLQKTVKELQTQIKDLKEKLEAERTTRAKMERERADLTQDLADLNERLEEVGGSSLAQLEITKKQETKFQKLHRDMEEATLHFETTSASLKKRHADSLAELEGQVENLQQVKQKLEKDKSDLQLEVDDLLTRVEQMTRAKANAEKLCTLYEERLHEATAKLDKVTQLANDLAAQKTKLWSESGEFLRRLEEKEALINQLSREKSNFTRQIEDLRGQLEKETKSQSALAHALQKAQRDCDLLREQYEEEQEVKAELHRTLSKVNAEMVQWRMKYENNVIQRTEDLEDAKKELAIRLQEAAEAMGVANARNASLERARHQLQLELGDALSDLGKVRSAAARLDQKQLQSGKALADWKQKHEESQALLDASQKEVQALSTELLKLKNTYEESIVGQETLRRENKNLQEEISNLTNQVREGTKNLTEMEKVKKLIEEEKTEVQVTLEETEGALERNESKILHFQLELLEAKAELERKLSEKDEEIENFRRKQQCTIDSLQSSLDSEAKSRIEVTRLKKKMEEDLNEMELQLSCANRQVSEATKSLGQLQIQIKDLQMQLDDSTQLNSDLKEQVAVAERRNSLLQSELEDLRSLQEQTERGRRLSEEELLEATERINLFYTQNTSLLSQKKKLEADVARMQKEAEEVVQECQNAEEKAKKAAIEAANLSEELKKKQDTIAHLERTRENMEQTITDLQKRLAEAEQMALMGSRKQIQKLESRVRELEGELEGEIRRSAEAQRGARRLERCIKELTYQAEEDKKNLSRMQTQMDKLQLKVQNYKQQVEVAETQANQYLSKYKKQQHELNEVKERAEVAESQVNKLKIKAREFGKKVQEE

SEQ ID NO: 358 - protein, 1669 aa, Homo sapiens
MGPRLSVWLLLLPAALLLHEEHSRAAAKGGCAGSGCGKCDCHGVKGQKGERGLPGLQGVIGFPGMQGPEGPQGPPGQKGDTGEPGLPGTKGTRGPPGASGYPGNPGLPGIPGQDGPPGPPGIPGCNGTKGERGPLGPPGLPGFAGNPGPPGLPGMKGDPGEILGHVPGMLLKGERGFPGIPGTPGPPGLPGLQGPVGPPGFTGPPGPPGPPGPPGEKGQMGLSFQGPKGDKGDQGVSGPPGVPGQAQVQEKGDFATKGEKGQKGEPGFQGMPGVGEKGEPGKPGPRGKPGKDGDKGEKGSPGFPGEPGYPGLIGRQGPQGEKGEAGPPGPPGIVIGTGPLGEKGERGYPGTPGPRGEPGPKGFPGLPGQPGPPGLPVPGQAGAPGFPGERGEKGDRGFPGTSLPGPSGRDGLPGPPGSPGPPGQPGYTNGIVECQPGPPGDQGPPGIPGQPGFIGEIGEKGQKGESCLICDIDGYRGPPGPQGPPGEIGFPGQPGAKGDRGLPGRDGVAGVPGPQGTPGLIGQPGAKGEPGEFYFDLRLKGDKGDPGFPGQPGMTGRAGSPGRDGHPGLPGPKGSPGSVGLKGERGPPGGVGFPGSRGDTGPPGPPGYGPAGPIGDKGQAGFPGGPGSPGLPGPKGEPGKIVPLPGPPGAEGLPGSPGFPGPQGDRGFPGTPGRPGLPGEKGAVGQPGIGFPGPPGPKGVDGLPGDMGPPGTPGRPGFNGLPGNPGVQGQKGEPGVGLPGLKGLPGLPGIPGTPGEKGSIGVPGVPGEHGAIGPPGLQGIRGEPGPPGLPGSVGSPGVPGIGPPGARGPPGGQGPPGLSGPPGIKGEKGFPGFPGLDMPGPKGDKGAQGLPGITGQSGLPGLPGQQGAPGIPGFPGSKGEMGVMGTPGQPGSPGPVGAPGLPGEKGDHGFPGSSGPRGDPGLKGDKGDVGLPGKPGSMDKVDMGSMKGQKGDQGEKGQIGPIGEKGSRGDPGTPGVPGKDGQAGQPGQPGPKGDPGISGTPGAPGLPGPKGSVGGMGLPGTPGEKGVPGIPGPQGSPGLPGDKGAKGEKGQAGPPGIGIPGLRGEKGDQGIAGFPGSPGEKGEKGSIGIPGMPGSPGLKGSPGSVGYPGSPGLPGEKGDKGLPGLDGIPGVKGEAGLPGTPGPTGPAGQKGEPGSDGIPGSAGEKGEPGLPGRGFPGFPGAKGDKGSKGEVGFPGLAGSPGIPGSKGEQGFMGPPGPQGQPGLPGSPGHATEGPKGDRGPQGQPGLPGLPGPMGPPGLPGIDGVKGDKGNPGWPGAPGVPGPKGDPGFQGMPGIGGSPGITGSKGDMGPPGVPGFQGPKGLPGLQGIKGDQGDQGVPGAKGLPGPPGPPGPYDIIKGEPGLPGPEGPPGLKGLQGLPGPKGQQGVTGLVGIPGPPGIPGFDGAPGQKGEMGPAGPTGPRGFPGPPGPDGLPGSMGPPGTPSVDHGFLVTRHSQTIDDPQCPSGTKILYHGYSLLYVQGNERAHGQDLGTAGSCLRKFSTMPFLFCNINNVCNFASRNDYSYWLSTPEPMPMSMAPITGENIRPFISRCAVCEAPAMVMAVHSQTIQIPPCPSGWSSLWIGYSFVMHTSAGAEGSGQALASPGSCLEEFRSAPFIECHGRGTCNYYANAYSFWLATIERSEMFKKPTPSTLKAGELRTHVSRCQVCMRRT

SEQ ID NO: 359 - protein, 1338 aa, Homo sapiens
MASPPRHGPPGPASGDGPNLNNNNNNNNHSVRKCGYLRKQKHGHKRFFVLRGPGAGGDEATAGGGSAPQPPRLEYYESEKKWRSKAGAPKRVIALDCCLNINKRADAKHKYLIALYTKDEYFAVAAENEQEQEGWYRALTDLVSEGRAAAGDAPPAAAPAASCSASLPGALGGSAGAAGAEDSYGLVAPATAAYREVWQVNLKPKGLGQSKNLTGVYRLCLSARTIGFVKLNCEQPSVTLQLMNIRRCGHSDSFFFIEVGRSAVTGPGELWMQADDSVVAQNIHETILEAMKALKELFEFRPRSKSQSSGSSATHPISVPGARRHHHLVNLPPSQTGLVRRSRTDSLAATPPAAKCSSCRVRTASEGDGGAAAGAAAAGARPVSVAGSPLSPGPVRAPLSRSHTLSGGCGGRGSKVALLPAGGALQHSRSMSMPVAHSPPAATSPGSLSSSSGHGSGSYPPPPGPHPPLPHPLHHGPGQRPSSGSASASGSPSDPGFMSLDEYGSSPGDLRAFCSHRSNTPESIAETPPARDGGGGGEFYGYMTMDRPLSHCGRSYRRVSGDAAQDLDRGLRKRTYSLTTPARQRPVPQPSSASLDEYTLMRATFSGSAGRLCPSCPASSPKVAYHPYPEDYGDIEIGSHRSSSSNLGADDGYMPMTPGAALAGSGSGSCRSDDYMPMSPASVSAPKQILQPRAAAAAAAAVPSAGPAGPAPTSAAGRTFPASGGGYKASSPAESSPEDSGYMRMWCGSKLSMEHADGKLLPNGDYLNVSPSDAVTTGTPPDFFSAALHPGGEPLRGVPGCCYSSLPRSYKAPYTCGGDSDQYVLMSSPVGRILEEERLEPQATPGPSQAASAFGAGPTQPPHPVVPSPVRPSGGRPEGFLGQRGRAVRPTRLSLEGLPSLPSMHEYPLPPEPKSPGEYINIDFGEPGARLSPPAPPLLASAASSSSLLSASSPASSLGSGTPGTSSDSRQRSPLSDYMNLDFSSPKSPKPGAPSGHPVGSLDGLLSPEASSPYPPLPPRPSASPSSSLQPPPPPPAPGELYRLPPASAVATAQGPGAASSLSSDTGDNGDYTEMAFGVAATPPQPIAAPPKPEAARVASPTSGVKRLSLMEQVSGVEAFLQASQPPDPHRGAKVIRADPQGGRRRHSSETFSSTTTVTPVSPSFAHNPKRHNSASVENVSLRKSSEGGVGVGPGGGDEPPTSPRQLQPAPPLAPQGRPWTPGQPGGLVGCPGSGGSPMRRETSAGFQNGLNYIAIDVREEPGLPPQPQPPPPPLPQPGDKSSWGRTRSLGGLISAVGVGSTGGGCGGPGPGALPPANTYASIDFLSHHLKEATIVKE

SEQ ID NO: 360 - protein, 1926 aa, Homo sapiens
MELSWHVVFIALLSFSCWGSDWESDRNFISTAGPLTNDLLHNLSGLLGDQSSNFVAGDKDMYVCHQPLPTFLPEYFSSLHASQITHYKVFLSWAQLLPAGSTQNPDEKTVQCYRRLLKALKTARLQPMVILHHQTLPASTLRRTEAFADLFADYATFAFHSFGDLVGIWFTFSDLEEVIKELPHQESRASQLQTLSDAHRKAYEIYHESYAFQGGKLSVVLRAEDIPELLLEPPISALAQDTVDFLSLDLSYECQNEASLRQKLSKLQTIEPKVKVFIFNLKLPDCPSTMKNPASLLFSLFEAINKDQVLTIGFDINEFLSCSSSSKKSMSCSLTGSLALQPDQQQDHETTDSSPASAYQRIWEAFANQSRAERDAFLQDTFPEGFLWGASTGAFNVEGGWAEGGRGVSIWDPRRPLNTTEGQATLEVASDSYHKVASDVALLCGLRAQVYKFSISWSRIFPMGHGSSPSLPGVAYYNKLIDRLQDAGIEPMATLFHWDLPQALQDHGGWQNESVVDAFLDYAAFCFSTFGDRVKLWVTFHEPWVMSYAGYGTGQHPPGISDPGVASFKVAHLVLKAHARTWHHYNSHHRPQQQGHVGIVLNSDWAEPLSPERPEDLRASERFLHFMLGWFAHPVFVDGDYPATLRTQIQQMNRQCSHPVAQLPEFTEAEKQLLKGSADFLGLSHYTSRLISNAPQNTCIPSYDTIGGFSQHVNHVWPQTSSSWIRVVPWGIRRLLQFVSLEYTRGKVPIYLAGNGMPIGESENLFDDSLRVDYFNQYINEVLKAIKEDSVDVRSYIARSLIDGFEGPSGYSQRFGLHHVNFSDSSKSRTPRKSAYFFTSIIEKNGFLTKGAKRLLPPNTVNLPSKVRAFTFPSEVPSKAKVVWEKFSSQPKFERDLFYHGTFRDDFLWGVSSSAYQIEGAWDADGKGPSIWDNFTHTPGSNVKDNATGDIACDSYHQLDADLNMLRALKVKAYRFSISWSRIFPTGRNSSINSHGVDYYNRLINGLVASNIFPMVTLFHWDLPQALQDIGGWENPALIDLFDSYADFCFQTFGDRVKFWMTFNEPMYLAWLGYGSGEFPPGVKDPGWAPYRIAHAVIKAHARVYHTYDEKYRQEQKGVISLSLSTHWAEPKSPGVPRDVEAADRMLQFSLGWFAHPIFRNGDYPDTMKWKVGNRSELQHLATSRLPSFTEEEKRFIRATADVFCLNTYYSRIVQHKTPRLNPPSYEDDQEMAEEEDPSWPSTAMNRAAPWGTRRLLNWIKEEYGDIPIYITENGVGLTNPNTEDTDRIFYHKTYINEALKAYRLDGIDLRGYVAWSLMDNFEWLNGYTVKFGLYHVDFNNTNRPRTARASARYYTEVITNNGMPLAREDEFLYGRFPEGFIWSAASAAYQIEGAWRADGKGLSIWDTFSHTPLRVENDAIGDVACDSYHKIAEDLVTLQNLGVSHYRFSISWSRILPDGTTRYINEAGLNYYVRLIDTLLAASIQPQVTIYHWDLPQTLQDVGGWENETIVQRFKEYADVLFQRLGDKVKFWITLNEPFVIAYQGYGYGTAAPGVSNRPGTAPYIVGHNLIKAHAEAWHLYNDVYRASQGGVISITISSDWAEPRDPSNQEDVEAARRYVQFMGGWFAHPIFKNGDYNEVMKTRIRDRSLAAGLNKSRLPEFTESEKRRINGTYDFFGFNHYTTVLAYNLNYATAISSFDADRGVASIADRSWPDSGSFWLKMTPFGFRRILNWLKEEYNDPPIYVTENGVSQREETDLNDTARIYYLRTYINEALKAVQDKVDLRGYTVWSAMDNFEWATGFSERFGLHFVNYSDPSLPRIPKASAKFYASVVRCNGFPDPATGPHACLHQPDAGPTISPVRQEEVQFLGLMLGTTEAQTALYVLFSLVLLGVCGLAFLSYKYCKRSKQGKTQRSQQELSPVSS

SEQ ID NO: 361 - protein, 2723 aa, Homo sapiens
MADEEAEQERLSCGEGGCVAELQRLGERLQELELQLRESRVPAVEAATDYCQQLCQTLLEYAEKWKTSEDPLPLLEVYTVAIQSYVKARPYLTSECENVALVLERLALSCVELLLCLPVELSDKQWEQFQTLVQVAHEKLMENGSCELHFLATLAQETGVWKNPVLCTILSQEPLDKDKVNEFLAFEGPILLDMRIKHLIKTNQLSQATALAKLCSDHPEIGIKGSFKQTYLVCLCTSSPNGKLIEEISEVDCKDALEMICNLESEGDEKSALVLCTAFLSRQLQQGDMYCAWELTLFWSKLQQRVEPSIQVYLERCRQLSLLTKTVYHIFFLIKVINSETEGAGLATCIELCVKALRLESTENTEVKISICKTISCLLPDDLEVKRACQLSEFLIEPTVDAYYAVEMLYNQPDQKYDEENLPIPNSLRCELLLVLKTQWPFDPEFWDWKTLKRQCLALMGEEASIVSSIDELNDSEVYEKVVDYQEESKETSMNGLSGGVGANSGLLKDIGDEKQKKREIKQLRERGFISARFRNWQAYMQYCVLCDKEFLGHRIVRHAQKHYKDGIYSCPICAKNFNSKETFVPHVTLHVKQSSKERLAAMKPLRRLGRPPKITTTNENQKTNTVAKQEQRPIKKNSLYSTDFIVFNDNDGSDDENDDKDKSYEPEVIPVQKPVPVNEFNCPVTFCKKGFKYFKNLIAHVKGHKDNEDAKRFLEMQSKKVICQYCRRHFVSVTHLNDHLQMHCGSKPYICIQMKCKAGFNSYAELLTHRKEHQVFRAKCMFPKCGRIFSEAYLLYDHEAQHYNTYTCKFTGCGKVYRSQGELEKHLDDHSTPPEKVLPPEAQLNSSGDSIQPSEVNQNTAENIEKERSMLPSENNIENSLLADRSDAWDKSKAESAVTKQDQISASELRQANGPLSNGLENPATTPLLQSSEVAVSIKVSLNQGIEDNFGKQENSTVEGSGEALVTDLHTPVEDTCNDLCHPGFQERKEQDCFNDAHVTQNSLVNSETLKIGDLTPQNLERQVNNLMTFSVQNQAAFQNNLPTSKFECGDNVKTSSNLYNLPLKTLESIAFVPPQSDLSNSLGTPSVPPKAPVQKFSCQVEGCTRTYNSSQSIGKHMKTAHPDQYAAFKMQRKSKKGQKANNLNTPNNGKFVYFLPSPVNSSNPFFTSQTKANGNPACSAQLQHVSPPIFPAHLASVSTPLLSSMESVINPNITSQDKNEQGGMLCSQMENLPSTALPAQMEDLTKTVLPLNIDSGSDPFLPLPAESSSMSLFPSPADSGTNSVFSQLENNTNHYSSQIEGNTNSSFLKGGNGENAVFPSQVNVANNFSSTNAQQSAPEKVKKDRGRGPNGKERKPKHNKRAKWPAIIRDGKFICSRCYRAFTNPRSLGGHLSKRSYCKPLDGAEIAQELLQSNGQPSLLASMILSTNAVNLQQPQQSTFNPEACFKDPSFLQLLAENRSPAFLPNTFPRSGVTNFNTSVSQEGSEIIKQALETAGIPSTFEGAEMLSHVSTGCVSDASQVNATVMPNPTVPPLLHTVCHPNTLLTNQNRTSNSKTSSIEECSSLPVFPTNDLLLKTVENGLCSSSFPNSGGPSQNFTSNSSRVSVISGPQNTRSSHLNKKGNSASKRRKKVAPPLIAPNASQNLVTSDLTTMGLIAKSVEIPTTNLHSNVIPTCEPQSLVENLTQKLNNVNNQLFMTDVKENFKTSLESHTVLAPLTLKTENGDSQMMALNSCTTSINSDLQISEDNVIQNFEKTLEIIKTAMNSQILEVKSGSQGAGETSQNAQINYNIQLPSVNTVQNNKLPDSSPFSSFISVMPTKSNIPQSEVSHKEDQIQEILEGLQKLKLENDLSTPASQCVLINTSVTLTPTPVKSTADITVIQPVSEMINIQFNDKVNKPFVCQNQGCNYSAMTKDALFKHYGKIHQYTPEMILEIKKNQLKFAPFKCVVPTCTKTFTRNSNLRAHCQLVHHFTTEEMVKLKIKRPYGRKSQSENVPASRSTQVKKQLAMTEENKKESQPALELRAETQNTHSNVAVIPEKQLVEKKSPDKTESSLQVITVTSEQCNTNALTNTQTKGRKIRRHKKEKEEKKRKKPVSQSLEFPTRYSPYRPYRCVHQGCFAAFTIQQNLILHYQAVHKSDLPAFSAEVEEESEAGKESEETETKQTLKEFRCQVSDCSRIFQAITGLIQHYMKLHEMTPEEIESMTASVDVGKFPCDQLECKSSFTTYLNYVVHLEADHGIGLRASKTEEDGVYKCDCEGCDRIYATRSNLLRHIFNKHNDKHKAHLIRPRRLTPGQENMSSKANQEKSKSKHRGTKHSRCGKEGIKMPKTKRKKKNNLENKNAKIVQIEENKPYSLKRGKHVYSIKARNDALSECTSRFVTQYPCMIKGCTSVVTSESNIIRHYKCHKLSKAFTSQHRNLLIVFKRCCNSQVKETSEQEGAKNDVKDSDTCVSESNDNSRTTATVSQKEVEKNEKDEMDELTELFITKLINEDSTSVETQANTSSNVSNDFQEDNLCQSERQKASNLKRVNKEKNVSQNKKRKVEKAEPASAAELSSVRKEEETAVAIQTIEEHPASFDWSSFKPMGFEVSFLKFLEESAVKQKKNTDKDHPNTGNKKGSHSNSRKNIDKTAVTSGNHVCPCKESETFVQFANPSQLQCSDNVKIVLDKNLKDCTELVLKQLQEMKPTVSLKKLEVHSNDPDMSVMKDISIGKATGRGQY

SEQ ID NO: 362 - protein, 3027 aa, Homo sapiens
MNLHQVLTGAVNPGDHCFSVGSIGDQRFTAYASGCDIVILGSDFERLQIIPGAKHGNIQVGCVDCSMQQGKIAASYGNVISIFEPVNLPKQKKNLELYSQWQKSGQFFLESIAHNITWDPTGSRLLTGSSYLQLWSNTNLEKPTEDENLNKTDLNFGDWKCIWHCKTASQVHLMKFSPDGEFFATAGKDDCLLKVWYNVENWRTAVTSPDGSSEKQSQGEIDFSFVYLAHPRAVNGFSWRKTSKYMPRASVCNVLLTCCKDNVCRLWVETFLPNDCLLYGGDCSHWTESINLTNNFKRNASSKERVQNALEVNLRHFRRGRRRSLALVAHTGYLPHQQDPHHVHRNTPLHANALCHFHIAASINPATDIPLLPSITSLSLNENEEKTGPFVVHWLNNKELHFTLSMEVFLQQLRKSFEQPSSEASVEDSNQADVKSDEETDDGVDDLKINPEKKELGCDKMVPNSSFTSLSSAAIDHQIEVLLSEWSKNADMLFSIHPMDGSLLVWHVDWLDEYQPGMFRQVQVSFVSRIPVAFPTGDANSLCKSIMMYACTKNVDLAIQQGKQKPSGLTRSTSMLISSGHNKSSNSLKLSIFTPNVMMISKHADGSLNQWLVSFAEESAFSTVLSISHKSRYCGHRFHLNDLACHSVLPLLLTTSHHNALRTPDVDNPEQPFDALNIEECSLTQQNKSTVDVAFQDPSAVYSELILWRVDPVGPLSFSGGVSELARINSLHVSAFSNVAWLPTLIPSYCLGAYCNSPSACFVASDGQYLRLYEAVIDAKKLLSELSNPEISKYVGEVFNIVSQQSTARPGCIIALDPITKLHGRKTQLLHVFEEDFILNNLEKKSLGKDSILSNAGSSPNGFSEKFYLIVIECTQDNRSLLHMWNLHLKSIPVSLDEKVDTKLSEAVWQPEEHYSSSPEKILSPFSQKYQACRANLQSTSRLTLFSEMVYSQELHLPEGVEIISIKPSAGHLSSSSIYPACSAPYLLATSCSDEKVRFWRCRVTDGESATSKNGKIDLAYIWEEWPLLIEDGLQSNSSITVPGRPVEVSCAHTNRLAVAYKQPASNSRSSQDFVMHVSIFECESTGGSCWVLEQTIHLDELSTVLDSGISVDSNLVAYNKQDMYLSSKENITSNTKHLVHLDWMSREDGSHILTVGIGSKLFMYGPLAGKVQDQTGKETLAFPLWESTKVVPLSKFVLLRSVDLVSSVDGSPPFPVSLSWVRDGILVVGMDCEMHVYCQWQPSSKQEPVITDSYSGSTPSITSLIKQSNSSSGLHPPKKTLTRSMTSLAQKICGKKTAFDPSVDMEDSGLFEAAHVLSPTLPQYHPLQLLELMDLGKVRRAKAILSHLVKCIAGEVVALNEAESNHERRLRSLTISASGSTTRDPQAFNKAENTDYTEIDSVPPLPLYALLAADDDSCYSSLEKSSNESTLSKSNQLSKESYDELFQTQLLMTDTHMLETDEENTKPRVIDLSQYSPTYFGPEHAQVLSGHLLHSSLPGLSRMEQMSLMALADTIATTSTDIGESRDRSQGGETLDECGLKFLLAVRLHTFLTTSLPAYRAQLLHQGLSTSHFAWAFHSVAEEELLNMLPAMQKDDPTWSELRAMGVGWWVRNTRILRKCIEKVAKAAFYRKNDPLDAAIFYLAMKKKAVIWGLYRAEKNTRMTQFFGHNFEDERWRKAALKNAFSLLGKQRFEHSAAFFLLAGCLRDAIEVCLEKLNDIQLALVIARLYESEFDTSAAYKSILRKKVLGIDSPVSELCSLNINMHHDPFLRSMAYWILEDYSGALETLIKQPIRENDDQVLSASNPTVFNFYNYLRTHPLLLRRHFGSSDTFSTHMSLTGKSGLAGTINLSERRLFFTTASAHLKAGCPMLALEVLSKMPKVIKKTRPFYRASSFLDTSKDCSPSSPLKLDAREDKSSAVDWSQSLINGFGSSSEGSSEKQSNSTLSFDWSQPSVVFQDDSLELKWDSDNDEENEDVPISMKELKPLQRKTDKKLDDISSNYTESFSTLDENDLLNPSEDIIAVQLKFRACLKILTVELRTLSTGYEIDGGKLRYQLYHWLEKEVIALQRTCDFCSDAEELQSAFGRNEDEFGLNEDAEDLPHQTKVKQLRENFQEKRQWLLKYQSLLRMFLSYCILHGSHGGGLASVRMELILLLQESQQETSEPLFSSPLSEQTSVPLLFACTANAKTVVANPLLHLSNLTHDILHAIINFDSPPHPDIQSNKVYVMHTLAASLSACIYQCLCGSHNYSSFQTNQFTGMVYQTVLLPHRPSLKTGSLDEALTPNTSPAQWPGITCLIRLLNSSGEEAQSGLTVLLCEILTAVYLSLFIHGLATHSSNELFRIVAHPLNEKMWSAVFGGGAHVPSKEQTHSKTLPVSSLVEEGEKQNKRFRPSKMSCRESAPLTPSSAPVSQESLAVKEKFIPPELSIWDYFIAKPFLPSSQSRAEYDSEESLGSDDDDNDDDDDVLASDFHLQEHSNSNSYSWSLMRLAMVQLVLNNLKTFYPFAGHDLAELPVSSPLCHAVLKTLQCWEQVLLRRLEIHGGPPQNYIASHTAEESLSAGPAILRHKALLEPTNTPFKSKHHLALSVKRLWQYLVKQEEIQETFIKNIFTKKRCLNEIEADLGYPGGKARIIHKESDIITAFAVNKANRNCIAIASSHDVQELDVSGILATQVYTWVDDDIEVETKGSEDFLVIHARDDLTAVQGTTPYTHSNPGTPINMPWLGSTQTGRGASVMIKKAINNVRRMTSHPTLPYYLTGAQDGSVRMFEWGHSQQITCFRSGGNSRVTRMRFNYQGNKFGIVDADGYLSLYQTNWKCCPVTGSMPKPYLTWQCHNKTANDFVFVSSSSLIATAGLSTDNRNVCLWDTLVAPANSLVHAFTCHDSGATVLAYAPKHQLLISGGRKGFTYVFDLCQRQQRQLFQSHDSPVKAVAVDPTEEYFVTGSAEGNIKIWSLSTFGLLHTFVSEHARQSIFRNIGTGVMQIETGPANHIFSCGADGTMKMRILPDQFSPLNEVLKNDVKFML

SEQ ID NO: 363 - protein, 3707 aa, Homo sapiens
MKGIRKGESRAKESKPWEPGKRRCAKCGRLDFILMKKMGIKSGFTFWNLVFLLTVSCVKGFIYTCGGTLKGLNGTIESPGFPYGYPNGANCTWVIIAEERNRIQIVFQSFALEEEYDYLSLYDGHPHPTNFRTRLTGFHLPPPVTSTKSVFSLRLTSDFAVSAHGFKVYYEELQSSSCGNPGVPPKGVLYGTRFDVGDKIRYSCVTGYILDGHPQLTCIANSVNTASWDFPVPICRAEDACGGTMRGSSGIISSPSFPNEYHNNADCTWTIVAEPGDTISLIFTDFQMEEKYDYLEIEGSEPPTIWLSGMNIPPPIISNKNWLRLHFVTDSNHRYRGFSAPYQGSSTLTHTTSTGELEEHNRTTTGAIAVASTPADVTVSSVTAVTIHRLSEEQRVQVTSLRNSGLDPNTSKDGLSPHPADTQSTRRRPRHAEQIERTKELAVVTHRVKKAIDFKSRGFKLFPGKDNSNKFSILNEGGIKTASNLCPDPGEPENGKRIGSDFSLGSTVQFSCDEDYVLQGAKSITCQRIAEVFAAWSDHRPVCKVKTCGSNLQGPSGTFTSPNFPFQYDSNAQCVWVITAVNTNKVIQINFEEFDLEIGYDTLTIGDGGEVGDPRTVLQVLTGSFVPDLIVSMSSQMWLHLQTDESVGSVGFKVNYKEIEKESCGDPGTPLYGIREGDGFSNRDVLRFECQFGFELIGEKSIVCQENNQWSANIPICIFPCLSNFTAPMGTVLSPDYPEGYGNNLNCIWTIISDPGSRIHLSFNDFDLESQFDFLAVKDGDSPESPILGTFTGAEVPSHLTSNSHILRLEFQADHSMSGRGFNITYNTFGHNECPDPGIPINARRFGDNFQLGSSISVICEEGFIKTQGTETITCILMDGKVMWSGLIPKCGAPCGGHFSAPSGVILSPGWPGYYKDSLNCEWVIEAEPGHSIKITFERFQTELNYDVLEVHDGPNLLSPLLGSYNGTQVPQFLFSSSNFIYLLFTTDNSRSNNGFKIHYESVTVNTYSCLDPGIPVHGRRYGHDFSIGSTVSFSCDSGYRLSHEEPLLCEKNHWWSHPLPTCDALCGGDVRGPSGTILSPGYPEFYPNSLNCTWTVDVTHGKGVQFNFHTFHLEDHHDYLLITENGSFTQPLARLTGSDLPPTINAGLYGNFRAQLRFISDFSISYEGFNITFSEYNLEPCEDPGIPQYGSRIGFNFGIGDTLTFSCSSGYRLEGTSEIICLGGGRRVWSAPLPRCVAECGASATNNEGILLSPNYPLNYENNHECIYSIQVQAGKGINISARTFHLAQGDVLKIYDGKDKTTHLLGAFTGASMRGLTLSSTSNQLWLEFNSDTEGTDEGFQLVYTSFELSHCEDPGIPQFGYKISDQGHFAGSTIIYGCNPGYTLHGSSLLKCMTGERRAWDYPLPSCIAECGGRFKGESSGRILSPGYPFPYDNNLRCMWMIEVDPGNIVSLQFLAFDTEASHDILRVWDGPPENDMLLKEISGSLIPEGIHSTLNIVTIQFDTDFYISKSGFAIQFSSSVATACRDPGVPMNGTRNGDGREPGDTVVFQCDPGYELQGEERITCIQVENRYFWQPSPPVCIAPCGGNLTGSSGFILSPNFPHPYPHSRDCDWTITVNADYVISLAFISFSIEPNYDFLYIYDGPDSNSPLIGSFQDSKLPERIESSSNTMHLAFRSDGSVSYTGFHLEYKAKLRESCFDPGNIMNGTRLGMDYKLGSTVTYYCDAGYVLQGYSTLTCIMGDDGRPGWNRALPSCHAPCGSRSTGSEGTVLSPNYPKNYSVGHNCVYSIAVPKEFVVFGQFVFFQTSLHDVVEVYDGPTQQSSLLSSLSGSHSGESLPLSSGNQITIRFTSVGPITAKGFHFVYQAVPRTSSTQCSSVPEPRFGRRIGNEFAVGSSVLFDCNPGYILHGSIAIRCETVPNSLAQWNDSLPTCIVPCGGILTKRKGTILSPGYPEPYDNNLNCVWKITVPEGAGIQVQVVSFATEHNWDSLDFYDGGDNNAPRLGSYSGTTIPHLLNSTSNNLYLNFQSDISVSAAGFHLEYTAIGLDSCPEPQTPSSGIKIGDRYMVGDVVSFQCDQGYSLQGHSHITCMPGPVRRWNYPIPICLAQCGGAMSDFSGVILSPGFPGNYPSSLDCTWTINLPIGFGVHLQFVNFSTETIHDYLEVRSGSSETSTVIGRLSGPQIPSSLFSTTHETSLYFHSDYSQNKQGFHIVYQAYQLQSCPDPRPFRNGFVIGNDFTVGQTISFECFPGYTLIGNSALTCLHGVSRNWNHPLPRCEALCGGNITAMNGTIYSPGYPDEYPNFQDCFWLVRVPPGNGIYINFTVLQTEPIYDFITVWDGPDQNSPQIGQFSGNTALESVYSTSNQILIKFHSDFTTSGFFVLSYHAYQLRVCQPPPPVPNAEILTEDDEFEIGDIIRYQCLPGFTLVGNAILTCRLGERLQMDGAPPVCQVLCPANELRLDSTGVILSPGYPDSYPNLQMCAWSISVEKGYNITMFVEFFQTEKEFDVLQVYDGPNIQSPVLISLSGDYSSAFNITSNGHEVFLQWSADHGNNKKGFRIRYIAFYCSTPESPPHGYIISQTGGQLNSVVRWACDRGFRLVGKSSAVCRKSSYGYHAWDAPVPACQAISCGIPKAPTNGGILTTDYLVGTRVTYFCNDGYRLSSKELTTAVCQSDGTWSNHNKTPRCVVVTCPSINSFILEHGRWRIVNGSHYEYKTKVVFSCDPGYHGLGPASIECLPNGTWSWRNERPYCQIISCGELPTPPNGNKIGTQTSYGSTAIFTCDLGFMLVGSAVRECLSSGLWSESETRCLAGHCGIPELIVNGQVIGENYGYRDTVVYQCNPGFRLIGSSVRICQQDHNWSGQLPSCVPVSCGHPGSPIYGRTSGNGFNFNDVVTFSCNIGYLMQGPTKAQCQANRQWSHPPPMCKVVNCSDPGIPANSKRESKIEHGNFTYGTVVFYDCNPGYFLFGSSVLICQPNGQWDKPLPECIMIDCGHPGVPPNAVLSGEKYTFGSTVHYSCTGKRSLLGQSSRTCQLNGHWSGSQPHCSGDATGTCGDPGTPGHGSRQESNFRTKSTVRYACDTGYILHGSEERTCLANGSWTGRQPECKAVQCGNPGTTANGKVFRIDGTTFSSSVIYSCMEGYILSGPSVRQCTANGTWSGTLPNCTIISCGDPGIPANGLRYGDDYVVGQNVSYMCQPGYTMELNGSRIRTCTINGTWSGVMPTCRAVTCPTPPQISNGRLEGTNFDWGFSISYICSPGYELSFPAVLTCVGNGTWSGEVPQCLPKFCGDPGIPAQGKREGKSFIYQSEVSFSCNFPFILVGSSTRICQADGTWSGSSPHCIEPTQTSCENPGVPRHGSQNNTFGFQVGSVVQFHCKKGHLLQGSTTRTCLPDLTWSGIQPECIPHSCKQPETPAHANVVGMDLPSHGYTLIYTCQPGFFLAGGTEHRVCRSDNTWTGKVPICEAGSKILVKDPRPALGTPSPKLSVPDDVFAQNYIWKGSYNFKGRKQPMTLTVTSFNASTGRVNATLSNSNMELLLSGVYKSQEARLMLRIYLIKVPAHASVKKMKEENWAMDGFVSAEPDGATYVFQGFIQGKDYGQFGLQRLGLNMSEGSNSSNQPHGTNSSSVAIAILVPFFALIFAGFGFYLYKQRTAPKTQYTGCSVHENNNGQAAFENPMYDTNAKSVEGKAVRFDPNLNTVCTMV

SEQ ID NO: 364 - protein, 1284 aa, Homo sapiens
MSSGDPAHLGLCLWLWLGATLGREQVQASGLLRLAVLPEDRLQMKWRESEGSGLGYLVQVKPMAGDSEQEVILTTKTPKATVGGLSPSKGYTLQIFELTGSGRFLLARREFVIEDLKSSSLDRSSQRPLGSGAPEPTPSHTGSPDPEQASEPQVAFTPSQDPRTPAGPQFRCLPPVPADMVFLVDGSWSIGHSHFQQVKDFLASVIAPFEIGPDKVQVGLTQYSGDAQTEWDLNSLSTKEQVLAAVRRLRYKGGNTFTGLALTHVLGQNLQPAAGLRPEAAKVVILVTDGKSQDDVHTAARVLKDLGVNVFAVGVKNADEAELRLLASPPRDITVHSVLDFLQLGALAGLLSRLICQRLQGGSPRQGPAAAPALDTLPAPTSLVLSQVTSSSIRLSWTPAPRHPLKYLIVWRASRGGTPREVVVEGPAASTELHNLASRTEYLVSVFPIYEGGVGEGLRGLVTTAPLPPPRALTLAAVTPRTVHLTWQPSAGATHYLVRCSPASPKGEEEEREVQVGRPEVLLDGLEPGRDYEVSVQSLRGPEGSEARGIRARTPTLAPPRHLGFSDVSHDAARVFWEGAPRPVRLVRVTYVSSEGGHSGQTEAPGNATSATLGPLSSSTTYTVRVTCLYPGGGSSTLTGRVTTKKAPSPSQLSMTELPGDAVQLAWVAAAPSGVLVYQITWTPLGEGKAHEISVPGNLGTAVLPGLGRHTEYDVTILAYYRDGARSDPVSLRYTPSTVSRSPPSNLALASETPDSLQVSWTPPLGRVLHYWLTYAPASGLGPEKSVSVPGARSHVTLPDLQAATKYRVLVSAIYAAGRSEAVSATGQTACPALRPDGSLPGFDLMVAFSLVEKAYASIRGVAMEPSAFGGTPTFTLFKDAQLTRRVSDVYPAPLPPEHTIVFLVRLLPETPREAFALWQMTAEDFQPLLGVLLDAGKKSLTYFHRDPRAALQEATFDPQEVRKIFFGSFHKVHVAVGRSKVRLYVDCRKVAERPLGEMGSPPAAGFVTLGRLAKARGPRSSSAAFQLQMLQIVCSDTWADEDRCCELPASRDGETCPAFVSACSCSSETPGPPGPQGPPGLPGRNGTPGEQGFPGPRGPPGVKGEKGDHGLPGLQGHPGHQGIPGRVGLQGPKGMRGLEGTAGLPGPPGPRGFQGMAGARGTSGERGPPGTVGPTGLPGPKGERGEKGEPQSLATLYQLVSQASHVSKFDSFHENTRPPMPILEQKLEPGTEPLGSPGTRSKALVPGEWGRGGRHLEGRGEPGAVGQMGSPGQQGASTQGLWE

SEQ ID NO: 365 - protein, 1630 aa, Homo sapiens
MPFAKRIVEPQWLCRQRRPAPGPAVDASGGSAEPPPPLQPPGRRDLDEVEAPGPEEPARAVPAPSGLPPPPPPLPAPADQTQPPHGEASVAGEESTAGIPEAAPAAGEASSAAAAAAVLLMLDLCAVSNAALARVLRQLSDVARHACSLFQELESDIQLTHRRVWALQGKLGGVQRVLSTLDPKQEAVPVSNLDIESKLSVYYRAPWHQQRNIFLPATRPPCVEELHRHARQSLQALRREHRSRSDRREQRAAAPLSIAAPPLPAYPPAHSQRRREFKDRHFLTSHPPEDEDTDVMLGQRPKNPIHNIPSTLDKQTNWSKALPLPTPEEKMKQDAQVISSCIIPINVTGVGFDREASIRCSLVHSQSVLQRRRKLRRRKTISGIPRRVQQEIDSDESPVARERNVIVHTNPDPSNTVNRISGTRDSECQTEDILIAAPSRRRIRAQRGQSIAASLSHSAGNISALADKGDTMFTPAVSSRTRSRSLPREGNRGGDAEPKVGAKPSAYEEGESFVGDHERTPNDFSEAPSSPSAQDHQPTLGLACSQHLHSPQHKLSERGRSRLSRMAADSGSCDISSNSDTFGSPIHCISTAGVLLSSHMDQKDDHQSSSGNWSGSSSTCPSQTSETIPPAASPPLTGSSHCDSELSLNTAPHANEDASVFVTEQYNDHLDKVRGHRANSFTSTVADLLDDPNNSNTSDSEWNYLHHHHDASCRQDFSPERPKADSLGCPSFTSMATYDSFLEKSPSDKADTSSHFSVDTEGYYTSMHFDCGLKGNKSYVCHYAALGPENGQGVGASPGLPDCAWQDYLDHKRQGRPSISFRKPKAKPTPPKRSSSLRKSDGNADISEKKEPKISSGQHLPHSSREMKLPLDFANTPSRMENANLPTKQEPSWINQSEQGIKEPQLDASDIPPFKDEVAESTHYADLWLLNDLKTNDPYRSLSNSSTATGTTVIECIKSPESSESQTSQSESRATTPSLPSVDNEFKLASPEKLAGLASPSSGYSSQSETPTSSFPTAFFSGPLSPGGSKRKPKVPERKSSLQQPSLKDGTISLSKDLELPIIPPTHLDLSALHNVLNKPFHHRHPLHVFTHNKQNTVGETLRSNPPPSLAITPTILKSVNLRSINKSEEVKQKEENNTDLPYLEESTLTTAALSPSKIRPHTANKSVSRQYSTEDTILSFLDSSAVEMGPDKLHLEKNSTFDVKNRCDPETITSAGSSLLDSNVTKDQVRTETEPIPENTPTKNCAFPTEGFQRVSAARPNDLDGKIIQYGPGPDETLEQVQKAPSAGLEEVAQPESVDVITSQSDSPTRATDVSNQFKHQFVMSRHHDKVPGTISYESEITSVNSFPEKCSKQENIASGISAKSASDNSKAEETQGNVDEASLKESSPSDDSIISPLSEDSQAEAEGVFVSPNKPRTTEDLFAVIHRSKRKVLGRKDSGDMSVRSKSRAPLSSSSSSASSITSPSSNVTTPNSQRSPGLIYRNAKKSNTSNEEFKLLLLKKGSRSDSSYRMSATEILKSPILPKPPGELTAESPQSTDDAHQGSQGAEALSPLSPCSPRVNAEGFSSKSFATSASARVGRSRAPPAASSSRYSVRCRLYNTPMQAISEGETENSDGSPHDDRSSQSST

SEQ ID NO: 366 - protein, 2213 aa, Homo sapiens
MARGARPSAAGGGGGGAEPPERAGPGRPRGSPPGRARPSLAPRPGPEPSRPRAAPETSGGDTAGAGRCGGRRAAKLGPGRRGWWALLALQLHLLRALAQDDVAPYFKTEPGLPQIHLEGNRLVLTCLAEGSWPLEFKWMRDDSELTTYSSEYKYIIPSLQKLDAGFYRCVVRNRMGALLQRKSEVQVAYMGSFMDTDQRKTVSQGRAAILNLLPITSYPRPQVTWFREGHKIIPSNRIAITLENQLVILATTTSDAGAYYVQAVNEKNGENKTSPFIHLSIARDVGTPETMAPTIVVPPGNRSVVAGSSETTLECIASARPVEDLSVTWKRNGVRITSGLHSFGRRLTISNPTSADTGPYVCEAALPGSAFEPARATAFLFIIEPPYFTAEPESRISAEVEETVDIGCQAMGVPLPTLQWYKDAISISRLQNPRYKVLASGGLRIQKLRPEDSGIFQCFASNEGGEIQTHTYLDVTNIAPVFTQRPVDTTVTDGMTAILRCEVSGAPKPAITWKRENHILASGSVRIPRFMLLESGGLQIAPVFIQDAGNYTCYAANTEGSLNASATLTVWNRTSIVHPPEDHVVIKGTTATLHCGATHDPRVSLRYVWKKDNVALTPSSTSRIVVEKDGSLLISQTWSGDIGDYSCEIVSEGGNDSRMARLEVIELPHSPQNLLVSPNSSHSHAVVLSWVRPFDGNSPILYYIVELSENNSPWKVHLSNVGPEMTGVTVSGLTPARTYQFRVCAVNEVGRGQYSAETSRLMLPEEPPSAPPKNIVASGRTNQSIMVQWQPPPETEHNGVLRGYILRYRLAGLPGEYQQRNITSPEVNYCLVTDLIIWTQYEIQVAAYNGAGLGVFSRAVTEYTLQGVPTAPPQNVQTEAVNSTTIQFLWNPPPQQFINGINQGYKLLAWPADAPEAVTVVTIAPDFHGVHHGHITNLKKFTAYFTSVLCFTTPGDGPPSTPQLVWTQEDKPGAVGHLSFTEILDTSLKVSWQEPLEKNGIITGYQISWEVYGRNDSRLTHTLNSTTHEYKIQGLSSLTTYTIDVAAVTAVGTGLVTSSTISSGVPPDLPGAPSNLVISNISPRSATLQFRPGYDGKTSISRWIVEGQVGAIGDEEEWVTLYEEENEPDAQMLEIPNLTPYTHYRFRMKQVNIVGPSPYSPSSRVIQTLQAPPDVAPTSVTVRTASETSLRLRWVPLPDSQYNGNPESVGYRIKYWRSDLQSSAVAQVVSDRLEREFTIEELEEWMEYELQMQAFNAVGAGPWSEVVRGRTRESVPSAAPENVSAEAVSSTQILLTWTSVPEQDQNGLILGYKILFRAKDLDPEPRSHIVRGNHTQSALLAGLRKFVLYELQVLAFTRIGNGVPSTPLILERTKDDAPGPPVRLVFPEVRLTSVRIVWQPPEEPNGIILGYQIAYRLASSSPHTFTTVEVGATVRQFTATDLAPESAYIFRLSAKTRQGWGEPLEATVITTEKRERPAPPRELLVPQAEVTARSLRLQWVPGSDGASPIRYFTMQVRELPRGEWQTYSSSISHEATACVVDRLRPFTSYKLRLKATNDIGDSDFSSETEAVTTLQDVPGEPPGSVSATPHTTSSVLIQWQPPRDESLNGLLQGYRIYYRELEYEAGSGTEAKTLKNPIALHAELTAQSSFKTVNSSSTSTMCELTHLKKYRRYEVIMTAYNIIGESPASAPVEVFVGEAAPAMAPQNVQVTPLTASQLEVTWDPPPPESQNGNIQGYKIYYWEADSQNETEKMKVLFLPEPVVRLKNLTSHTKYLVSISAFNAAGDGPKSDPQQGRTHQAAPGAPSFLAFSEITSTTLNVSWGEPAAANGILQGYRVVYEPLAPVQGVSKVVTVEVRGNWQRWLKVRDLTKGVTYFFRVQARTITYGPELQANITAGPAEGSPGSPRDVLVTKSASELTLQWTEGHSGDTPTTGYVIEARPSDEGLWDMFVKDIPRSATSYTLSLDKLRQGVTYEFRVVAVNEAGYGEPSNPSTAVSAQVEAPFYEEWWFLLVMALSSLIVILLVVFALVLHGQNKKYKNCSTGKGISTMEESVTLDNGGFAALELSSRHLNVKSTFSKKNGTRSPPRPSPGGLHYSDEDICNKYNGAVLTESVSLKEKSADASESEATDSDYEDALPKHSFVNHYMSDPTYYNSWKRRAQGRAPAPHRYEAVAGSEAGAQLHPVITTQSAGGVYTPAGPGARTPLTGFSSFV

SEQ ID NO: 367 - protein, 2103 aa, Homo sapiens
MSVPGTPGAMEPAGEEERPPPAAEGEDDEEEVAAAAQTSGPAHGRSASSLEDADDQEEEMEAMVIGGGCCKEQELTYELQQGYRILGEFLQEKHRGLTAPFLQPLGGVATAEEEVAEGPRSGGRGGRAFPQQPGQGMCLLQMEEKFASGQYGGITEFVADFRLMLETCYRLHGVDHWISKQGQKLEMMLEQKLALLSRHLREKTTIAVTSRGYYGLEDEKGTACTSTRRRSTPRSLAGLTSGVFESIMVQVLRQEEQLRAKEEKRLREQERKEAEEASQKEIEEWERKLLAQAAPTCMETMWEIPAIGHFLCLAQQILNLPEIVFYELERCLLMPQCNAFLSKIMTSLLSPPHRRPTLHRRPTLPYRTWEAALRQKVQQWYTAVGQTENPDNCAEKLGLCPQFFKVLGEVNPLEEKPFHELPFYQKVWLLKGLCDFVYETQKEVQDAVLGQPIHECREVILGYDYLENAYVHFPQFCGADVRIYKQRPFQAPEFPIPPIKIQRVPRIKLEKLKCDYVSTSNGEHRCSRDSLPSSFKKEQENNFDPACCPAKMILDNHDISVEMGVKSNYEIRIRRPCEIKKTDCCKENLEKPRSPGEVTGFGEPLSPGEIRFIENQEKYGEASRIKIEPSPLKENTLKSCQIHVNGSHSDHPEINCHKVVRDILLEQSLQSHKKLKLTKMRAKKKKKKKKKLKDVLNENLQRKREGLHSLAFKSYKPEIQNKLLIIKKKAKHKKHKSGKKSVSKKAITKKRKTVIKSPTVPEFQLICTNLDELRELITKIENELKDLENSRKKSGKWYHRRQAVKELHSTLIRLLNELLPWEPKLMKAFQRNRSRLKKDYDDFRRQPDHDTFNRELWTTDEGEGDLGKDSPKGEISKSIDSTEPLDILEKDHFDSDDMKLSEIDFPMARSKLLKKELPSKDLPKTLLKTLKRQSKQTDYVDDSTKELSPRKKAKLSTNETTVENLESDVQIDCFSESKHTEPSFPESFASLDSVPVSTLQKGTKPIQALLAKNIGNKVTLTNQLPPSTGRNALAVEKPVLSPPEASPIKPALTCHTNTKGPLQMVYKMPCGQWLPIDLQNSSVKIQVQPMVDPKTGEKIMQQVLILPKNFVIQHKEGKAVAKEVPPLQQKGTEQHCSSFPQTTNINSSLASVFVNSPGTVSTQLPNTAFNKTITPLSNISSARPQPLSPVTSVSNLLTPSVKTSQSEAGKAKNAVSAATFSLPSASPTISSTGQPLSSTTTLNGSTNPGSSFNCFAQQTADSSEAKQELKTVCIRDSQSILVRTRGGNTGVVKVQTNPDQNSPNTVSSSSVFTFAPQLQAFLVPKSTTSSSAFSPVAGTTTTSSLSPFSQTPTSVSIPASFAPSMGKNLKLTLGHTTGSGDLGHVIDKTSHMPSSPLKSSICSSTLLPSTTSSSVSVISISAANFGQNNANIIHTPTKQQQVDYITKSYPVTRSEATAATNGDVISGTPVQKLMLVSAPSILSSGNGTAINMTPALTSTGVSAQKLVFINAPVPSGTSTPTLVAESLKQTLPPPLHKAYVKTPEQPQIVLIPSTVGTPIKINSSPAVSQIKDVKIGLNIGQAIVNTSGTVPAIPSINILQNVTPKGEDKSSKGYILPLSTSGNSVPVSSNFVSQNITPVNESVVSSARAVNVLSVTGANLSLGSFPVTSASASAGAQPPVLVSGNDTSSRIMPILSNRLCSSSLGNTVAISTVKTGHLASSVLISTTQPVVSPKCLTSALQIPVTVALPTPATTSPKIINTVPHSAAVPGATRSVSISKRQSRTSLQFHSPGISTTVPTNVNTNKPQTELSSLSTSPGKITNTSNFASLPNQQALVKTPSYSSAPGGTTIHTASAPSNVTSLVGSQFSEPCIQQKIVINTSTPLAPGTQIMINGTRFIVPPQGLGAGSHVLLISTNPKYGAPLVLNSGQGIQSTPIDNSAQKITLASNNSLSGQPLQHPLRSPTKFINSFGNASSIPTVHTSPQLINTTAKVPVPPPVPTVSLTSVIKSPATLLAKTSLVSAICPSNPPLPSSTSVFHLDPPVKKLLVSPEGAILNTINTPASKVSSLSPSLSQIVVSASRSPASVFPAFQSSGLEKPDRAAS

SEQ ID NO: 368 - protein, 2881 aa, Homo sapiens
MTDPMMDFFDDANLFGETLEGLSDDAFVQPGPVSLVDELNLGAEFEPLHIDSLNHVQGTPTHQKMTDFEQLNQFDSIKFHHVNQSFGSPAEHVLSPHSQFNCSPIHPQNQPNGLFPDVSDGSPMWGHQTATTISNQNGSPFHQQGHSHSMHQNKSFVAHHDFALFQANEQQTQCTSLRSQQNRNNLNPGQNSLSQSKNFMNVSGPHRVNVNHPPQMTNASNSQQSISMQQFSQTSNPSAHFHKCSSHQEGNFNGPSPNMTSCSVSNSQQFSSHYSFSSNHISPNSLLQSSAVLASNHTNQTLSDFTGSNSFSPHRGIKQESTQHILNPNTSLNSNNFQILHSSHPQGNYSNSKLSPVHMNFPDPVDSGTQMGHFNDHVETNGFSSLEENLLHQVESQTEPFTGLDPEDLLQEGLLPHFDESTFGQDNSSHILDHDLDRQFTSHLVTRPSDMAQTQLQSQARSWHSSFSNHQHLHDRNHLCLQRQPPSSKKSDGSGTYTKLQNTQVRVMSEKKQRKKVESESKQEKANRIISEAIAKAKERGERNIPRVMSPENFPTASVEGKEEKKGRRMKSKPKDKDSKKTKTCSKLKEKTKIGKLIITLGKKQKRKNESSDEISDAEQMPQHTLKDQDSQKRRSNRQIKRKKYAEDIEGKQSEEEVKGSMKIKKNSAPLPGEQPLQLFVENPSEEDAAIVDKILSSRTVKKEISPGVMIDTEEFFVKYKNYSYLHCEWATEEQLLKDKRIQQKIKRFKLRQAQRAHFFADMEEEPFNPDYVEVDRVLEVSFCEDKDTGEPVIYYLVKWCSLPYEDSTWELKEDVDLAKIEEFEQLQASRPDTRRLDRPPSNIWKKIDQSRDYKNGNQLREYQLEGLNWLLFNWYNRRNCILADEMGLGKTIQSITFLYEILLTGIRGPFLIIAPLSTIANWEREFRTWTDINVVVYHGSLISRQMIQQYEMYFRDSQGRIIRGAYRFQAIITTFEMILGGCGELNAIEWRCVIIDEAHRLKNKNCKLLEGLKLMNLEHKVLLTGTPLQNTVEELFSLLHFLEPLRFPSESTFMQEFGDLKTEEQVQKLQAILKPMMLRRLKEDVEKKLAPKEETIIEVELTNIQKKYYRAILEKNFSFLSKGAGQTNVPNLVNTMMELRKCCNHPYLIKGAEEKILGEFRDTYNPAASDFHLQAMIQSAGKLVLIDKLLPKMKAGGHKVLIFSQMVRCLDILEDYLIHKRYLYERIDGRVRGNLRQAAIDRFSKPDSDRFVFLLCTRAGGLGINLTAADTCIIFDSDWNPQNDLQAQARCHRIGQNKAVKVYRLVTRNSYEREMFDRASLKLGLDKAVLQSMSGRESNVGGIQQLSKKEIEDLLRRGAYGAIMEEEDEGSKFCEEDIDQILLRRTKTITIESEGRGSTFAKASFVASGNRTDISLDDPNFWQKWAKKAEIDIEAISGRNSLVIDTPRIRKQTRPFSATKDELAELSEAESEGDEKPKLRRPCDRSNGYGRTECFRVEKNLLVYGWGRWREILSHGRFKRQLNEHDVEIICRALLAYCLVHYRGDEKIKGFIWDLITPTEDGQTRELQNHLGLSAPVPRGRKGKKVKTQTSSFDIQKAEWLRKYNPEQLLQDEGYKKHIKHHCNKVLLRVRMLYYLKQEVIGNECQKVFDGVDASDIDVWVPEPDHSEVPAEWWDFDADKSLLIGVFKHGYEKYNTIRADPALCFLERVGKPDEKAVAAEQRANDYMDGDVEDPEYKPAPAIFKDDIEDDVSSPGDLVIADGDGQLMEGDKVYWPTQSALTTRLRRLITAYQRTNKNRQIQQIQPTFSVPTSVMQPIYEEATLNPKMAAKIERQQRWTRREEADFYRVVSTFGVVFDPDRGQFDWTKFRAMARLHKKTDDSLEKYLYAFMSMCRRVCRLPSKEELVDPNIFIQPITEERASRTLYRIELLRKVREQALRHPQLFERLKLCHPNPDLPVWWECGPHDRDLLIGAAKHGVSRTDYHILRDPELSFMAAQRNYSQSKMAHSRTSTPLLQQYQVALSASPLTSLPRLLDAKGIILEEMKVKSENLKEEPQSSEEESMSSVETRTLIKSEPVSPKNGVLPQATGDQKSGGKCETDRRMVAARTEPLTPNPASKKPRVHKRGSESSSDSDSDSERSSCSSRSSSSSSSSSCSHSRSGSSSSSSSSCSSASSSSSSSTSSSSSSSSSSSEESDSDEEEAQKRESTTHMKAYDEESVASLSTTQDETQDSFQMNNGTPESAYILQGGYMLAASYWPKDRVMINRLDSICQTVLKGKWPSARRSYDANTVASFYTTKLLDSPGAATEYSDPSVPTPPGAGVKEEHDQSTQMSKEGGLKLTFQKQGLAQKRPFDGEDGALGQQQYLTRLRELQSASETSLVNFPKSIPVSGTSIQPTLGANGVILDNQPIVKKRRGRRKNVEGVDIFFFNRNKPPNHVSLGLTSSQISTGINPALSYTQPQGIPDTESPVPVINLKDGTRLAGDDAPKRKDLEKWLKEHPGYVEDLGAFIPRMQLHEGRPKQKRHRCRNPNKLDVNSLTGEERVQLINRRNARKVGGAFAPPLKDLCRFLKENSEYGVAPEWGDVVKQSGFLPESMYERILTGPVVREEVSRRGRRPKSGIAKATAAAAAASATSVSGNPLLANGLLPGVDLTTLQALQQNLQNLQSLQVTAGLMGMPTGLPSGGEAKNMAAMFPMLLSGMAGLPNLLGMGGLLTKPTESGTEDKKGSDSKESEGKTERTESQSSENGGENSVSSSPSTSSTAALNTAAAANPLALNPLLLSNILYPGMLLTPGLNLHIPTLSQSNTFDVQNKNSDLGSSKSVEVKEEDSRIKDQEDKGGTEPSPLNENSTDEGSEKADASSGSDSTSSSSEDSDSSNED

SEQ ID NO: 369 - protein, 2897 aa, Homo sapiens
MDPRNTAMLGLGSDSEGFSRKSPSAISTGTLVSKREVELEKNTKEEEDLRKRNRERNIEAGKDDGLTDAQQQFSVKETNFSEGNLKLKIGLQAKRTKKPPKNLENYVCRPAIKTTIKHPRKALKSGKMTDEKNEHCPSKRDPSKLYKKADDVAAIECQSEEVIRLHSQGENNPLSKKLSPVHSEMADYINATPSTLLGSRDPDLKDRALLNGGTSVTEKLAQLIATCPPSKSSKTKPKKLGTGTTAGLVSKDLIRKAGVGSVAGIIHKDLIKKPTISTAVGLVTKDPGKKPVFNAAVGLVNKDSVKKLGTGTTAVFINKNLGKKPGTITTVGLLSKDSGKKLGIGIVPGLVHKESGKKLGLGTVVGLVNKDLGKKLGSTVGLVAKDCAKKIVASSAMGLVNKDIGKKLMSCPLAGLISKDAINLKAEALLPTQEPLKASCSTNINNQESQELSESLKDSATSKTFEKNVVRQNKESILEKFSVRKEIINLEKEMFNEGTCIQQDSFSSSEKGSYETSKHEKQPPVYCTSPDFKMGGASDVSTAKSPFSAVGESNLPSPSPTVSVNPLTRSPPETSSQLAPNPLLLSSTTELIEEISESVGKNQFTSESTHLNVGHRSVGHSISIECKGIDKEVNDSKTTHIDIPRISSSLGKKPSLTSESSIHTITPSVVNFTSLFSNKPFLKLGAVSASDKHCQVAESLSTSLQSKPLKKRKGRKPRWTKVVARSTCRSPKGLELERSELFKNVSCSSLSNSNSEPAKFMKNIGPPSFVDHDFLKRRLPKLSKSTAPSLALLADSEKPSHKSFATHKLSSSMCVSSDLLSDIYKPKRGRPKSKEMPQLEGPPKRTLKIPASKVFSLQSKEEQEPPILQPEIEIPSFKQGLSVSPFPKKRGRPKRQMRSPVKMKPPVLSVAPFVATESPSKLESESDNHRSSSDFFESEDQLQDPDDLDDSHRPSVCSMSDLEMEPDKKITKRNNGQLMKTIIRKINKMKTLKRKKLLNQILSSSVESSNKGKVQSKLHNTVSSLAATFGSKLGQQINVSKKGTIYIGKRRGRKPKTVLNGILSGSPTSLAVLEQTAQQAAGSALGQILPPLLPSSASSSEILPSPICSQSSGTSGGQSPVSSDAGFVEPSSVPYLHLHSRQGSMIQTLAMKKASKGRRRLSPPTLLPNSPSHLSELTSLKEATPSPISESHSDETIPSDSGIGTDNNSTSDRAEKFCGQKKRRHSFEHVSLIPPETSTVLSSLKEKHKHKCKRRNHDYLSYDKMKRQKRKRKKKYPQLRNRQDPDFIAELEELISRLSEIRITHRSHHFIPRDLLPTIFRINFNSFYTHPSFPLDPLHYIRKPDLKKKRGRPPKMREAMAEMPFMHSLSFPLSSTGFYPSYGMPYSPSPLTAAPIGLGYYGRYPPTLYPPPPSPSFTTPLPPPSYMHAGHLLLNPAKYHKKKHKLLRQEAFLTTSRTPLLSMSTYPSVPPEMAYGWMVEHKHRHRHKHREHRSSEQPQVSMDTGSSRSVLESLKRYRFGKDAVGERYKHKEKHRCHMSCPHLSPSKSLINREEQWVHREPSESSPLALGLQTPLQIDCSESSPSLSLGGFTPNSEPASSDEHTNLFTSAIGSCRVSNPNSSGRKKLTDSPGLFSAQDTSLNRLHRKESLPSNERAVQTLAGSQPTSDKPSQRPSESTNCSPTRKRSSSESTSSTVNGVPSRSPRLVASGDDSVDSLLQRMVQNEDQEPMEKSIDAVIATASAPPSSSPGRSHSKDRTLGKPDSLLVPAVTSDSCNNSISLLSEKLTSSCSPHHIKRSVVEAMQRQARKMCNYDKILATKKNLDHVNKILKAKKLQRQARTGNNFVKRRPGRPRKCPLQAVVSMQAFQAAQFVNPELNRDEEGAALHLSPDTVTDVIEAVVQSVNLNPEHKKGLKRKGWLLEEQTRKKQKPLPEEEEQENNKSFNEAPVEIPSPSETPAKPSEPESTLQPVLSLIPREKKPPRPPKKKYQKAGLYSDVYKTTDPKSRLIQLKKEKLEYTPGEHEYGLFPAPIHVGKYLRQKRIDFQLPYDILWQWKHNQLYKKPDVPLYKKIRSNVYVDVKPLSGYEATTCNCKKPDDDTRKGCVDDCLNRMIFAECSPNTCPCGEQCCNQRIQRHEWVQCLERFRAEEKGWGIRTKEPLKAGQFIIEYLGEVVSEQEFRNRMIEQYHNHSDHYCLNLDSGMVIDSYRMGNEARFINHSCDPNCEMQKWSVNGVYRIGLYALKDMPAGTELTYDYNFHSFNVEKQQLCKCGFEKCRGIIGGKSQRVNGLTSSKNSQPMATHKKSGRSKEKRKSKHKLKKRRGHLSEEPSENINTPTRLTPQLQMKPMSNRERNFVLKHHVFLVRNWEKIRQKQEEVKHTSDNIHSASLYTRWNGICRDDGNIKSDVFMTQFSALQTARSVRTRRLAAAEENIEVARAARLAQIFKEICDGIISYKDSSRQALAAPLLNLPPKKKNADYYEKISDPLDLITIEKQILTGYYKTVEAFDADMLKVFRNAEKYYGRKSPVGRDVCRLRKAYYNARHEASAQIDEIVGETASEADSSETSVSEKENGHEKDDDVIRCICGLYKDEGLMIQCDKCMVWQHCDCMGVNSDVEHYLCEQCDPRPVDREVPMIPRPHYAQPGCVYFICLLRDDLLLRQGDCVYLMRDSRRTPDGHPVRQSYRLLSHINRDKLDIFRIEKLWKNEKEERFAFGHHYFRPHETHHSPSRRFYHNELFRVPLYEIIPLEAVVGTCCVLDLYTYCKGRPKGVKEQDVYICDYRLDKSAHLFYKIHRNRYPVCTKPYAFDHFPKKLTPKKDFSPHYVPDNYKRNGGRSSWKSERSKPPLKDLGQEDDALPLIEEVLASQEQAANEIPSLEEPEREGATANVSEGEKKTEE

SEQ ID NO: 370 - protein, 2104 aa, Homo sapiens
MESQEFIVLYTHQKMKKSKVWQDGILKITHLGNKAILYDDKGACLESLFLKCLEVKPGDDLESDRYLITVEEVKVAGAIGIVKQNVNKEAPELNSRTFISSGRSLGCQPSGLKRKFTGFQGPRQVPKKMVIMESGESAASHEAKKTGPTIFSPFCSMPPLFPTVGKKDVNNILADPENIVTYKNRERNAMDFSSVFSPSFQINPEVLCEENYFCSPVNSGNKLSDSLLTNEPVKRDSLASHYSGVSQNIRSKAQILALLKSESSSSCEELNSEMTEHFPQKQPQGSLKIATKPKYLIQQEECAEMKSTENLYYQHQSENTMRNKSRWAMYLSSQSSPIHSSTVDGNDTERKPKAQEDDVNSNLKDLSLQKIIQFVETYAEERKKYNVDQSVGNNDPSWNQEVKLEIPSFNESSSLQVTCSSAENDGILSESDIQEDNKIPFNQNDKGCIKGSVLIKENAQEVNTCGTLEKEYEQSESSLPELKHLQIESSNNSRISDDITDMISESKMDNESLNSIHESLSNVTQPFLEVTFNLNNFETSDTEEESQESNKISQDSESWVKDILVNDGNSCFQKRSENTNCEEIEGEHLPFLTSVSDKPTVTFPVKETLPSQFCDKTYVGFDMGICKTENTGKEIEEYSDTLSNFESFKWTDAVYGDNKEDANKPIQEVRINYDFALPPNKSKGINMNLHIPHIQNQIAENSNLFSEDAQPQPFILGSDLDKNDEHVLPSTSSSDNSVQLLNTNQNHYECIALDKSNTHISNSLFYPLGKKHLISKDTEAHISEPEDLGKIRSPPPDHVEVETAREGKQYWNPRNSSELSGLVNTISILKSLCEHSTALDSLEILKKKNTVFQQGTQQTYEPDSPPEVRKPFITVVSPKSPHLHKDSQQILKEDEVELSEPLQSVQFSSSGSKEETAFQAVIPKQIERKTCDPKPVEFQGHQVKGSATSGVMVRGHSSQLGCSQFPDSTEYENFMTETPELPSTCMQIDFLQVTSPEENISTLSPVSTFSLNSRDEDFMVEFSETSLKARTLPDDLHFLNLEGMKKSRSLENENLQRLSLLSRTQVPLITLPRTDGPPDLDSHSYMINSNTYESSGSPMLNLCEKSAVLSFSIEPEDQNETFFSEESREVNPGDVSLNNISTQSKWLKYQNTSQCNVATPNRVDKRITDGFFAEAVSGMHFRDTSERQSDAVNESSLDSVHLQMIKGMLYQQRQDFSSQDSVSRKKVLSLNLKQTSKTEEIKNVLGGSTCYNYSVKDLQEISGSELCFPSGQKIKSAYLPQRQIHIPAVFQSPAHYKQTFTSCLIEHLNILLFGLAQNLQKALSKVDISFYTSLKGEKLKNAENNVPSCHHSQPAKLVMVKKEGPNKGRLFYTCDGPKADRCKFFKWLEDVTPGYSTQEGARPGMVLSDIKSIGLYLRSQKIPLYEECQLLVRKGFDFQRKQYGKLKKFTTVNPEFYNEPKTKLYLKLSRKERSSAYSKNDLWVVSKTLDFELDTFIACSAFFGPSSINEIEILPLKGYFPSNWPTNMVVHALLVCNASTELTTLKNIQDYFNPATLPLTQYLLTTSSPTIVSNKRVSKRKFIPPAFTNVSTKFELLSLGATLKLASELIQVHKLNKDQATALIQIAQMMASHESIEEVKELQTHTFPITIIHGVFGAGKSYLLAVVILFFVQLFEKSEAPTIGNARPWKLLISSSTNVAVDRVLLGLLSLGFENFIRVGSVRKIAKPILPYSLHAGSENESEQLKELHALMKEDLTPTERVYVRKSIEQHKLGTNRTLLKQVRVVGVTCAACPFPCMNDLKFPVVVLDECSQITEPASLLPIARFECEKLILVGDPKQLPPTIQGSDAAHENGLEQTLFDRLCLMGHKPILLRTQYRCHPAISAIANDLFYKGALMNGVTEIERSPLLEWLPTLCFYNVKGLEQIERDNSFHNVAEATFTLKLIQSLIASGIAGSMIGVITLYKSQMYKLCHLLSAVDFHHPDIKTVQVSTVDAFQGAEKEIIILSCVRTRQVGFIDSEKRMNVALTRGKRHLLIVGNLACLRKNQLWGRVIQHCEGREDGLQHANQYEPQLNHLLKDYFEKQVEEKQKKKSEKEKSKDKSHS

SEQ ID NO: 371 - protein, 2214 aa, Homo sapiens
MKRKERIARRLEGIENDTQPILLQSCTGLVTHRLLEEDTPRYMRASDPASPHIGRSNEEEETSDSSLEKQTRSKYCTETSGVHGDSPYGSGTMDTHSLESKAERIARYKAERRRQLAEKYGLTLDPEADSEYLSRYTKSRKEPDAVEKRGGKSDKQEESSRDASSLYPGTETMGLRTCAGESKDYALHVGDGSSDPEVLLNIENQRRGQELSATRQAHDLSPAAESSSTFSFSGRDSSFTEVPRSPKHAHSSSLQQAASRSPSFGDPQLSPEARPSTGKPKHEWFLQKDSEGDTPSLINWPSRVKVREKLVKEESARNSPELASESVTQRRHQPAPVHYVSFQSEHSAFDRVPSKAAGSTRQPIRGYVQPADTGHTAKLVTPETPENASECSWVASATQNVPKPPSLTVLEGDGRDSPVLHVCESKAEEEEGEGEGEEKEEDVCFTEALEQSKKTLLALEGDGLVRSPEDPSRNEDFGKPAVSTVTLEHQKELENVAQPPQAPHQPTERTGRSEMVLYIQSEPVSQDAKPTGHNREASKKRKVRTRSLSDFTGPPQLQALKYKDPASRRELELPSSKTEGPYGEISMLDTKVSVAQLRSAFLASANACRRPELKSRVERSAEGPGLPTGVERERGSRKPRRYFSPGESRKTSERFRTQPITSAERKESDRCTSHSETPTVDDEEKVDERAKLSVAAKRLLFREMEKSFDEQNVPKRRSRNTAVEQRLRRLQDRSLTQPITTEEVVIAATEPIPASCSGGTHPVMARLPSPTVARSAVQPARLQASAHQKALAKDQTNEGKELAEQGEPDSSTLSLAEKLALFNKLSQPVSKAISTRNRIDTRQRRMNARYQTQPVTLGEVEQVQSGKLIPFSPAVNTSVSTVASTVAPMYAGDLRTKPPLDHNASATDYKFSSSIENSDSPVRSILKSQAWQPLVEGSENKGMLREYGETESKRALTGRDSGMEKYGSFEEAEASYPILNRAREGDSHKESKYAVPRRGSLERANPPITHLGDEPKEFSMAKMNAQGNLDLRDRLPFEEKVEVENVMKRKFSLRAAEFGEPTSEQTGTAAGKTIAQTTAPVSWKPQDSSEQPQEKLCKNPCAMFAAGEIKTPTGEGLLDSPSKTMSIKERLALLKKSGEEDWRNRLSRRQEGGKAPASSLHTQEAGRSLIKKRVTESRESQMTIEERKQLITVREEAWKTRGRGAANDSTQFTVAGRMVKKGLASPTAITPVASPICGKTRGTTPVSKPLEDIEARPDMQLESDLKLDRLETFLRRLNNKVGGMHETVLTVTGKSVKEVMKPDDDETFAKFYRSVDYNMPRSPVEMDEDFDVIFDPYAPKLTSSVAEHKRAVRPKRRVQASKNPLKMLAAREDLLQEYTEQRLNVAFMESKRMKVEKMSSNSNFSEVTLAGLASKENFSNVSLRSVNLTEQNSNNSAVPYKRLMLLQIKGRRHVQTRLVEPRASALNSGDCFLLLSPHCCFLWVGEFANVIEKAKASELATLIQTKRELGCRATYIQTIEEGINTHTHAAKDFWKLLGGQTSYQSAGDPKEDELYEAAIIETNCIYRLMDDKLVPDDDYWGKIPKCSLLQPKEVLVFDFGSEVYVWHGKEVTLAQRKIAFQLAKHLWNGTFDYENCDINPLDPGECNPLIPRKGQGRPDWAIFGRLTEHNETILFKEKFLDWTELKRSNEKNPGELAQHKEDPRTDVKAYDVTRMVSMPQTTAGTILDGVNVGRGYGLVEGHDRRQFEITSVSVDVWHILEFDYSRLPKQSIGQFHEGDAYVVKWKFMVSTAVGSRQKGEHSVRAAGKEKCVYFFWQGRHSTVSEKGTSALMTVELDEERGAQVQVLQGKEPPCFLQCFQGGMVVHSGRREEEEENVQSEWRLYCVRGEVPVEGNLLEVACHCSSLRSRTSMVVLNVNKALIYLWHGCKAQAHTKEVGRTAANKIKEQCPLEAGLHSSSKVTIHECDEGSEPLGFWDALGRRDRKAYDCMLQDPGSFNFAPRLFILSSSSGDFAATEFVYPARAPSVVSSMPFLQEDLYSAPQPALFLVDNHHEVYLWQGWWPIENKITGSARIRWASDRKSAMETVLQYCKGKNLKKPAPKSYLIHAGLEPLTFTNMFPSWEHREDIAEITEMDTEVSNQITLVEDVLAKLCKTIYPLADLLARPLPEGVDPLKLEIYLTDEDFEFALDMTRDEYNALPAWKQVNLKKAKGLF

SEQ ID NO: 372 - protein, 2170 aa, Homo sapiens
MKDSEGPQRPPLCFLSTLLSQKVPEKSDAVLRCIISGQPKPEVTWYKNGQAIDGSGIISNYEFFENQYIHVLHLSCCTKNDAAVYQISAKNSFGMICCSASVEVECSSENPQLSPNLEDDRDRGWKHETGTHEEERANQIDEKEHPYKEEESISPGTPRSADSSPSKSNHSLSLQSLGNLDISVSSSENPLGVKGTRHTGEAYDPSNTEEIANGLLFLNSSHIYEKQDRCCHKTVHSMASKFTDGDLNNDGPHDEGLRSSQQNPKVQKYISFSLPLSEATAHIYPGDSAVANKQPSPQLSSEDSDSDYELCPEITLTYTEEFSDDDLEYLECSDVMTDYSNAVWQRNLLGTEHVFLLESDDEEMEFGEHCLGGCEHFLSGMGCGSRVSGDAGPMVATAGFCGHHSQPQEVGVRSSRVSKHGPSSPQTGMTLILGPHQDGTSSVTEQGRYKLPTAPEAAENDYPGIQGETRDSHQAREEFASDNLLNMDESVRETEMKLLSGESENSGMSQCWETAADKRVGGKDLWSKRGSRKSARVRQPGMKGNPKKPNANLRESTTEGTLHLCSAKESAEPPLTQSDKRETSHTTAAATGRSSHADARECAISTQAEQEAKTLQTSTDSVSKEGNTNCKGEGMQVNTLFETSQVPDWSDPPQVQVQETVRETISCSQMPAFSEPAGEESPFTGTTTISFSNLGGVHKENASLAQHSEVKPCTCGPQHEEKQDRDGNIPDNFREDLKYEQSISEANDETMSPGVFSRHLPKDARADFREPVAVSVASPEPTDTALTLENVCDEPRDREAVCAMECFEAGDQGTCFDTIDSLVGRPVDKYSPQEICSVDTELAEGQNKVSDLCSSNDKTLEVFFQTQVSETSVSTCKSSKDGNSVMSPLFTSTFTLNISHTASEGATGENLAKVENSTYPLASTVHAGQEQPSPSNSGGLDETQLLSSENNPLVQFKEGGDKSPSPSAADTTATPASYSSIVSFPWEKPTTLTANNECFQATRETEDTSTVTIATEVHPAKYLAVSIPEDKHAGGTEERFPRASHEKVSQFPSQVQLDHILSGATIKSTKELLCRAPSVPGVPHHVLQLPEGEGFCSNSPLQVDNLSGDKSQTVDRADFRSYEENFQERGSETKQGVQQQSLSQQGSLSAPDFQQSLPTTSAAQEERNLVPTAHSPASSREGAGQRSGWGTRVSVVAETAGEEDSQALSNVPSLSDILLEESKEYRPGNWEAGNKLKIITLEASASEIWPPRQLTNSESKASDGGLIIPDKVWAVPDSLKADAVVPELAPSEIAALAHSPEDAESALADSRESHKGEEPTISVHWRSLSSRGFSQPRLLESSVDPVDEKELSVTDSLSAASETGGKENVNNVSQDQEEKQLKMDHTAFFKKFLTCPKILESSVDPIDEISVIEYTRAGKPEPSETTPQGAREGGQSNDGNMGHEAEIQPAILQVPCLQGTILSENRISRSQEGSMKQEAEQIQPEEAKTAIWQVLQPSEGGERIPSGCSIGQIQESSDGSLGEAEQSKKDKAELISPTSPLSSCLPIMTHASLGVDTHNSTGQIHDVPENDIVEPRKRQYVFPVSQKRGTIENERGKPLPSSPDLTRFPCTSSPEGNVTDFLISHKMEEPKIEVLQIGETKPPSSSSSSAKTLAFISGERELEKAPKLLQDPCQKGTLGCAKKSREREKSLEARAGKSPGTLTAVTGSEEVKRKPEAPGSGHLAEGVKKKILSRVAALRLKLEEKENIRKNSAFLKKMPKLETSLSHTEEKQDPKKPSCKREGRAPVLLKKIQAEMFPEHSGNVKLSCQFAEIHEDSTICWTKDSKSIAQVQRSAGDNSTVSFAIVQASPKDQGLYYCCIKNSYGKVTAEFNLTAEVLKQLSSRQDTKGCEEIEFSQLIFKEDFLHDSYFGGRLRGQIATEELHFGEGVHRKAFRSTVMHGLMPVFKPGHACVLKVHNAIAYGTRNNDELIQRNYKLAAQECYVQNTARYYAKIYAAEAQPLEGFGEVPEIIPIFLIHRPENNIPYATVEEELIGEFVKYSIRDGKEINFLRRESEAGQKCCTFQHWVYQKTSGCLLVTDMQGVGMKLTDVGIATLAKGYKGFKGNCSMTFIDQFKALHQCNKYCKMLGLKSLQNNNQKQKQPSIGKSKVQTNSMTIKKAGPETPGEKKT

SEQ ID NO: 373 - protein, 2002 aa, Homo sapiens
MEERKHETMNPAHVLFDRFVQATTCKGTLKAFQELCDHLELKPKDYRSFYHKLKSKLNYWKAKALWAKLDKRGSHKDYKKGKACTNTKCLIIGAGPCGLRTAIDLSLLGAKVVVIEKRDAFSRNNVLHLWPFTIHDLRGLGAKKFYGKFCAGAIDHISIRQLQLILLKVALILGIEIHVNVEFQGLIQPPEDQENERIGWRALVHPKTHPVSEYEFEVIIGGDGRRNTLEGFRRKEFRGKLAIAITANFINRNTTAEAKVEEISGVAFIFNQKFFQELREATGIDLENIVYYKDDTHYFVMTAKKQSLLDKGVILHDYADTELLLSRENVDQEALLSYAREAADFSTQQQLPSLDFAINHYGQPDVAMFDFTCMYASENAALVREQNGHQLLVALVGDSLLEPFWPMGTGIARGFLAAMDSAWMVRSWSLGTSPLEVLAERESIYRLLPQTTPENVSKNFSQYSIDPVTRYPNINVNFLRPSQVRHLYDTGETKDIHLEMESLVNSRTTPKLTRNESVARSSKLLGWCQRQTDGYAGVNVTDLTMSWKSGLALCAIIHRYRPDLIDFDSLDEQNVEKNNQLAFDIAEKELGISPIMTGKEMASVGEPDKLSMVMYLTQFYEMFKDSLPSSDTLDLNAEEKAVLIASTRSPISFLSKLGQTISRKRSPKDKKEKDLDGAGKRRKTSQSEEEEAPRGHRGERPTLVSTLTDRRMDVAVGNQNKVKYMATQLLAKFEENAPAQSIGIRRQGSMKKEFPQNLGGSDTCYFCQKRVYVMERLSAEGKFFHRSCFKCEYCATTLRLSAYAYDIEDGKFYCKPHYCYRLSGYAQRKRPAVAPLSGKEAKGPLQDGATTDANGRANAVASSTERTPGSGVNGLEEPSIAKRLRGTPERIELENYRLSLRQAEALQEVPEETQAEHNLSSVLDTGAEEDVASSSSESEMEEEGEEEEEEPRLPPSDLGGVPWKEAVRIHALLKGKSEEELEASKSFGPGNEEEEEEEEEYEEEEEEDYDEEEEESSEAGNQRLQQVMHAADPLEIQADVHWTHIREREEEERMAPASESSASGAPLDENDLEEDVDSEPAEIEGEAAEDGDPGDTGAELDDDQHWSDSPSDADRELRLPCPAEGEAELELRVSEDEEKLPASPKHQERGPSQATSPIRSPQESALLFIPVHSPSTEGPQLPPVPAATQEKSPEERLFPEPLLPKEKPKADAPSDLKAVHSPIRSQPVTLPEARTPVSPGSPQPQPPVAASTPPPSPLPICSQPQPSTEATVPSPTQSPIRFQPAPAKTSTPLAPLPVQSQSDTKDRLGSPLAVDEALRRSDLVEEFWMKSAEIRRSLGLTPVDRSKGPEPSFPTPAFRPVSLKSYSVEKSPQDEGLHLLKPLSIPKRLGLPKPEGEPLSLPTPRSPSDRELRSAQEERRELSSSSGLGLHGSSSNMKTLGSQSFNTSDSAMLTPPSSPPPPPPPGEEPATLRRKLREAEPNASVVPPPLPATWMRPPREPAQPPREEVRKSFVESVEEIPFADDVEDTYDDKTEDSSLQEKFFTPPSCWPRPEKPRHPPLAKENGRLPALEGTLQPQKRGLPLVSAEAKELAEERMRAREKSVKSQALRDAMARQLSRMQQMELASGAPRPRKASSAPSQGKERRPDSPTRPTLRGSEEPTLKHEATSEEVLSPPSDSGGPDGSFTSSEGSSGKSKKRSSLFSPRRNKKEKKSKGEGRPPEKPSSNLLEEAAAKPKSLWKSVFSGYKKDKKKKADDKSCPSTPSSGATVDSGKHRVLPVVRAELQLRRQLSFSEDSDLSSDDVLEKSSQKSRREPRTYTEEELNAKLTRRVQKAARRQAKQEELKRLHRAQIIQRQLQQVEERQRRLEERGVAVEKALRGEAGMGKKDDPKLMQEWFKLVQEKNAMVRYESELMIFARELELEDRQSRLQQELRERMAVEDHLKTEEELSEEKQILNEMLEVVEQRDSLVALLEEQRLREREEDKDLEAAMLSKGFSLNWS

SEQ ID NO: 374 - protein, 2623 aa, Homo sapiens
MKVKGRGITCLLVSFAVICLVATPGGKACPRRCACYMPTEVHCTFRYLTSIPDSIPPNVERINLGYNSLVRLMETDFSGLTKLELLMLHSNGIHTIPDKTFSDLQALQVLKMSYNKVRKLQKDTFYGLRSLTRLHMDHNNIEFINPEVFYGLNFLRLVHLEGNQLTKLHPDTFVSLSYLQIFKISFIKFLYLSDNFLTSLPQEMVSYMPDLDSLYLHGNPWTCDCHLKWLSDWIQEKPDVIKCKKDRSPSSAQQCPLCMNPRTSKGKPLAMVSAAAFQCAKPTIDSSLKSKSLTILEDSSSAFISPQGFMAPFGSLTLNMTDQSGNEANMVCSIQKPSRTSPIAFTEENDYIVLNTSFSTFLVCNIDYGHIQPVWQILALYSDSPLILERSHLLSETPQLYYKYKQVAPKPEDIFTNIEADLRADPSWLMQDQISLQLNRTATTFSTLQIQYSSDAQITLPRAEMRPVKHKWTMISRDNNTKLEHTVLVGGTVGLNCPGQGDPTPHVDWLLADGSKVRAPYVSEDGRILIDKSGKLELQMADSFDTGVYHCISSNYDDADILTYRITVVEPLVEAYQENGIHHTVFIGETLDLPCHSTGIPDASISWVIPGNNVLYQSSRDKKVLNNGTLRILQVTPKDQGYYRCVAANPSGVDFLIFQVSVKMKGQRPLEHDGETEGSGLDESNPIAHLKEPPGAQLRTSALMEAEVGKHTSSTSKRHNYRELTLQRRGDSTHRRFRENRRHFPPSARRIDPQHWAALLEKAKKNAMPDKRENTTVSPPPVVTQLPNIPGEEDDSSGMLALHEEFMVPATKALNLPARTVTADSRTISDSPMTNINYGTEFSPVVNSQILPPEEPTDFKLSTAIKTTAMSKNINPTMSSQIQGTTNQHSSTVFPLLLGATEFQDSDQMGRGREHFQSRPPITVRTMIKDVNVKMLSSTTNKLLLESVNTTNSHQTSVREVSEPRHNHFYSHTTQILSTSTFPSDPHTAAHSQFPIPRNSTVNIPLFRRFGRQRKIGGRGRIISPYRTPVLRRHRYSIFRSTTRGSSEKSTTAFSATVLNVTCLSCLPRERLTTATAALSFPSAAPITFPKADIARVPSEESTTLVQNPLLLLENKPSVEKTTPTIKYFRTEISQVTPTGAVMTYAPTSIPMEKTHKVNASYPRVSSTNEAKRDSVITSSLSGAITKPPMTIIAITRFSRRKIPWQQNFVNNHNPKGRLRNQHKVSLQKSTAVMLPKTSPALPRDKVSPFHFTTLSTSVMQIPSNTLTTAHHTTTKTHNPGSLPTKKELPFPPLNPMLPSIISKDSSTKSIISTQTAIPATTPTFPASVITYETQTERSRAQTIQREQEPQKKNRTDPNISPDQSSGFTTPTAMTPPVLTTAETSVKPSVSAFTHSPPENTTGISSTISFHSRTLNLTDVIEELAQASTQTLKSTIASETTLSSKSHQSTTTRKAIIRHSTIPPFLSSSATLMPVPISPPFTQRAVTDNVATPISGLMTNTVVKLHESSRHNAKPQQLVAEVATSPKVHPNAKFTIGTTHFIYSNLLHSTPMPALTTVKSQNSKLTPSPWAENQFWHKPYSEIAEKGKKPEVSMLATTGLSEATTLVSDWDGQKNTKKSDFDKKPVQEATTSKLLPFDSLSRYIFEKPRIVGGKAASFTIPANSDAFLPCEAVGNPLPTIHWTRVPSGLDLSKRKQNSRVQVLPNGTLSIQRVEIQDRGQYLCSASNLFGTDHLHVTLSVVSYPPRILERRTKEITVHSGSTVELKCRAEGRPSPTVTWILANQTVVSESSQGSRQAVVTVDGTLVLHNLSIYDRGFYKCVASNPGGQDSLLVKIQVIAAPPVILEQRRQVIVGTWGESLKLPCTAKGTPQPSVYWVLSDGTEVKPLQFTNSKLFLFSNGTLYIRNLASSDRGTYECIATSSTGSERRVVMLTMEERVTSPRIEAASQKRTEVNFGDKLLLNCSATGEPKPQIMWRLPSKAVVDQQHRVGSWIHVYPNGSLFIGSVTEKDSGVYLCVARNKMGDDLILMHVSLRLKPAKIDHKQYFRKQVLHGKDFQVDCKASGSPVPEISWSLPDGTMINNAMQADDSGHRTRRYTLFNNGTLYFNKVGVAEEGDYTCYAQNTLGKDEMKVHLTVITAAPRIRQSNKTNKRIKAGDTAVLDCEVTGDPKPKIFWLLPSNDMISFSIDRYTFHANGSLTINKVKLLDSGEYVCVARNPSGDDTKMYKLDVVSKPPLINGLYTNRTVIKATAVRHSKKHFDCRAEGTPSPEVMWIMPDNIFLTAPYYGSRITVHKNGTLEIRNVRLSDSADFICVARNEGGESVLVVQLEVLEMLRRPTFRNPFNEKIVAQLGKSTALNCSVDGNPPPEIIWILPNGTRFSNGPQSYQYLIASNGSFIISKTTREDAGKYRCAARNKVGYIEKLVILEIGQKPVILTYAPGTVKGISGESLSLHCVSDGIPKPNIKWTMPSGYVVDRPQINGKYILHDNGTLVIKEATAYDRGNYICKAQNSVGHTLITVPVMIVAYPPRITNRPPRSIVTRTGAAFQLHCVALGVPKPEITWEMPDHSLLSTASKERTHGSEQLHLQGTLVIQNPQTSDSGIYKCTAKNPLGSDYAATYIQVI

SEQ ID NO: 375 - protein, 2024 aa, Homo sapiens
MATGGGPFEDGMNDQDLPNWSNENVDDRLNNMDWGAQQKKANRSSEKNKKKFGVESDKRVTNDISPESSPGVGRRRTKTPHTFPHSRYMSQMSVPEQAELEKLKQRINFSDLDQRSIGSDSQGRATAANNKRQLSENRKPFNFLPMQINTNKSKDASTSPPNRETIGSAQCKELFASALSNDLLQNCQVSEEDGRGEPAMESSQIVSRLVQIRDYITKASSMREDLVEKNERSANVERLTHLIDHLKEQEKSYMKFLKKILARDPQQEPMEEIENLKKQHDLLKRMLQQQEQLRALQGRQAALLALQHKAEQAIAVMDDSVVAETAGSLSGVSITSELNEELNDLIQRFHNQLRDSQPPAVPDNRRQAESLSLTREVSQSRKPSASERLPDEKVELFSKMRVLQEKKQKMDKLLGELHTLRDQHLNNSSSSPQRSVDQRSTSAPSASVGLAPVVNGESNSLTSSVPYPTASLVSQNESENEGHLNPSEKLQKLNEVRKRLNELRELVHYYEQTSDMMTDAVNENRKDEETEESEYDSEHENSEPVTNIRNPQVASTWNEVNSHSNAQCVSNNRDGRTVNSNCEINNRSAANIRALNMPPSLDCRYNREGEQEIHVAQGEDDEEEEEEAEEEGVSGASLSSHRSSLVDEHPEDAEFEQKINRLMAAKQKLRQLQDLVAMVQDDDAAQGVISASASNLDDFYPAEEDTKQNSNNTRGNANKTQKDTGVNEKAREKFYEAKLQQQQRELKQLQEERKKLIDIQEKIQALQTACPDLQLSAASVGNCPTKKYMPAVTSTPTVNQHETSTSKSVFEPEDSSIVDNELWSEMRRHEMLREELRQRRKQLEALMAEHQRRQGLAETASPVAVSLRSDGSENLCTPQQSRTEKTMATWGGSTQCALDEEGDEDGYLSEGIVRTDEEEEEEQDASSNDNFSVCPSNSVNHNSYNGKETKNRWKNNCPFSADENYRPLAKTRQQNISMQRQENLRWVSELSYVEEKEQWQEQINQLKKQLDFSVSICQTLMQDQQTLSCLLQTLLTGPYSVMPSNVASPQVHFIMHQLNQCYTQLTWQQNNVQRLKQMLNELMRQQNQHPEKPGGKERGSSASHPPSPSLFCPFSFPTQPVNLFNIPGFTNFSSFAPGMNFSPLFPSNFGDFSQNISTPSEQQQPLAQNSSGKTEYMAFPKPFESSSSIGAEKPRNKKLPEEEVESSRTPWLYEQEGEVEKPFIKTGFSVSVEKSTSSNRKNQLDTNGRRRQFDEESLESFSSMPDPVDPTTVTKTFKTRKASAQASLASKDKTPKSKSKKRNSTQLKSRVKNIRYESASMSSTCEPCKSRNRHSAQTEEPVQAKVFSRKNHEQLEKIIKCNRSTEISSETGSDFSMFEALRDTIYSEVATLISQNESRPHFLIELFHELQLLNTDYLRQRALYALQDIVSRHISESHEKGENVKSVNSGTWIASNSELTPSESLATTDDETFEKNFERETHKISEQNDADNASVLSVSSNFEPFATDDLGNTVIHLDQALARMREYERMKTEAESNSNMRCTCRIIEDGDGAGAGTTVNNLEETPVIENRSSQQPVSEVSTIPCPRIDTQQLDRQIKAIMKEVIPFLKEHMDEVCSSQLLTSVRRMVLTLTQQNDESKEFVKFFHKQLGSILQDSLAKFAGRKLKDCGEDLLVEISEVLFNELAFFKLMQDLDNNSITVKQRCKRKIEATGVIQSCAKEAKRILEDHGSPAGEIDDEDKDKDETETVKQTQTSEVYDGPKNVRSDISDQEEDEESEGCPVSINLSKAETQALTNYGSGEDENEDEEMEEFEEGPVDVQTSLQANTEATEENEHDEQVLQRDFKKTAESKNVPLEREATSKNDQNNCPVKPCYLNILEDEQPLNSAAHKESPPTVDSTQQPNPLPLRLPEMEPLVPRVKEVKSAQETPESSLAGSPDTESPVLVNDYEAESGNISQKSDEEDFVKVEDLPLKLTIYSEADLRKKMVEEEQKNHLSGEICEMQTEELAGNSETLKEPETVGAQSI

SEQ ID NO: 376 - protein, 1827 aa, Homo sapiens
MADERKDEAKAPHWTSAPLTEASAHSHPPEIKDQGGAGEGLVRSANGFPYREDEEGAFGEHGSQGTYSNTKENGINGELTSADRETAEEVSARIVQVVTAEAVAVLKGEQEKEAQHKDQTAALPLAAEETANLPPSPPPSPASEQTVTVEEDLLTASKMEFHDQQELTPSTAEPSDQKEKESEKQSKPGEDLKHAALVSQPETTKTYPDKKDMQGTEEEKAPLALFGHTLVASLEDMKQKTEPSLVVPGIDLPKEPPTPKEQKDWFIEMPTEAKKDEWGLVAPISPGPLTPMREKDVFDDIPKWEGKQFDSPMPSPFQGGSFTLPLDVMKNEIVTETSPFAPAFLQPDDKKSLQQTSGPATAKDSFKIEEPHEAKPDKMAEAPPSEAMTLPKDAHIPVVEEHVMGKVLEEEKEAINQETVQQRDTFTPSGQEPILTEKETELKLEEKTTISDKEAVPKESKPPKPADEEIGIIQTSTEHTFSEQKDQEPTTDMLKQDSFPVSLEQAVTDSAMTSKTLEKAMTEPSALIEKSSIQELFEMRVDDKDKIEGVGAATSAELDMPFYEDKSGMSKYFETSALKEEATKSIEPGSDYYELSDTRESVHESIDTMSPMHKNGDKEFQTGKESQPSPPAQEAGYSTLAQSYPSDLPEEPSSPQERMFTIDPKVYGEKRDLHSKNKDDLTLSRSLGLGGRSAIEQRSMSINLPMSCLDSIALGFNFGRGHDLSPLASDILTNTSGSMDEGDDYLPATTPALEKAPCFPVESKEEEQIEKVKATGEESTQAEISCESPFLAKDFYKNGTVMAPDLPEMLDLAGTRSRLASVSADAEVARRKSVPSETVVEDSRTGLPPVTDENHVIVKTDSQLEDLGYCVFNKYTVPLPSPVQDSENLSGESGTFYEGTDDKVRRDLATDLSLIEVKLAAAGRVKDEFSVDKEASAHISGDKSGLSKEFDQEKKANDRLDTVLEKSEEHADSKEHAKKTEEAGDEIETFGLGVTYEQALAKDLSIPTDASSEKAEKGLSSVPEIAEVEPSKKVEQGLDFAVQGQLDVKISDFGQMASGLNIDDRRATELKLEATQDMTPSSKAPQEADAFMGVESGHMKEGTKVSETEVKEKVAKPDLVHQEAVDKEESYESSGEHESLTMESLKADEGKKETSPESSLIQDEIAVKLSVEIPCPPAVSEADLATDERADVQMEFIQGPKEESKETPDISITPSDVAEPLHETIVSEPAEIQSEEEEIEAQGEYDKLLFRSDTLQITDLGVSGAREEFVETCPSEHKGVIESVVTIEDDFITVVQTTTDEGESGSHSVRFAALEQPEVERRPSPHDEEEFEVEEAAEAQAEPKDGSPEAPASPEREEVALSEYKTETYDDYKDETTIDDSIMDADSLWVDTQDDDRSIMTEQLETIPKEEKAEKEARRSSLEKHRKEKPFKTGRGRISTPERKVAKKEPSTVSRDEVRRKKAVYKKAELAKKTEVQAHSPSRKFILKPAIKYTRPTHLSCVKRKTTAAGGESALAPSVFKQAKDKVSDGVTKSPEKRSSLPRPSSILPPRRGVSGDRDENSFSLNSSISSSARRTTRSEPIRRAGKSGTSTPTTPGSTAITPGTPPSYSSRTPGTPGTPSYPRTPHTPGTPKSAILVPSEKKVAIIRTPPKSPATPKQLRLINQPLPDLKNVKSKIGSTDNIKYQPKGGQVQIVTKKIDLSHVTSKCGSLKNIRHRPGGGRVKIESVKLDFKEKAQAKVGSLDNAHHVPGGGNVKIDSQKLNFREHAKARVDHGAEIITQSPGRSSVASPRRLSNVSSSGSINLLESPQLATLAEDVTAALAKQGL

SEQ ID NO: 377 - protein, 2062 aa, Homo sapiens
MPKSGFTKPIQSENSDSDSNMVEKPYGRKSKDKIASYSKTPKIERSDVSKEMKEKSSMKRKLPFTISPSRNEERDSDTDSDPGHTSENWGERLISSYRTYSEKEGPEKKKTKKEAGNKKSTPVSILFGYPLSERKQMALLMQMTARDNSPDSTPNHPSQTTPAQKKTPSSSSRQKDKVNKRNERGETPLHMAAIRGDVKQVKELISLGANVNVKDFAGWTPLHEACNVGYYDVAKILIAAGADVNTQGLDDDTPLHDSASSGHRDIVKLLLRHGGNPFQANKHGERPVDVAETEELELLLKREVPLSDDDESYTDSEEAQSVNPSSVDENIDSETEKDSLICESKQILPSKTPLPSALDEYEFKDDDDEEINKMIDDRHILRKEQRKENEPEAEKTHLFAKQEKAFYPKSFKSKKQKPSRVLYSSTESSDEEALQNKKISTSCSVIPETSNSDMQTKKEYVVSGEHKQKGKVKRKLKNQNKNKENQELKQEKEGKENTRITNLTVNTGLDCSEKTREEGNFRKSFSPKDDTSLHLFHISTGKSPKHSCGLSEKQSTPLKQEHTKTCLSPGSSEMSLQPDLVRYDNTESEFLPESSSVKSCKHKEKSKHQKDFHLEFGEKSNAKIKDEDHSPTFENSDCTLKKMDKEGKTLKKHKLKHKEREKEKHKKEIEGEKEKYKTKDSAKELQRSVEFDREFWKENFFKSDETEDLFLNMEHESLTLEKKSKLEKNIKDDKSTKEKHVSKERNFKEERDKIKKESEKSFREEKIKDLKEERENIPTDKDSEFTSLGMSAIEESIGLHLVEKEIDIEKQEKHIKESKEKPEKRSQIKEKDIEKMERKTFEKEKKIKHEHKSEKDKLDLSECVDKIKEKDKLYSHHTEKCHKEGEKSKNTAAIKKTDDREKSREKMDRKHDKEKPEKERHLAESKEKHLMEKKNKQSDNSEYSKSEKGKNKEKDRELDKKEKSRDKESINITNSKHIQEEKKSSIVDGNKAQHEKPLSLKEKTKDEPLKTPDGKEKDKKDKDIDRYKERDKHKDKIQINSLLKLKSEADKPKPKSSPASKDTRPKEKRLVNDDLMQTSFERMLSLKDLEIEQWHKKHKEKIKQKEKERLRNRNCLELKIKDKEKTKHTPTESKNKELTRSKSSEVTDAYTKEKQPKDAVSNRSQSVDTKNVMTLGKSSFVSDNSLNRSPRSENEKPGLSSRSVSMISVASSEDSCHTTVTTPRPPVEYDSDFMLESSESQMSFSQSPFLSIAKSPALHERELDSLADLPERIKPPYANRLSTSHLRSSSVEDVKLIISEGRPTIEVRRCSMPSVICEHTKQFQTISEESNQGSLLTVPGDTSPSPKPEVFSNVPERDLSNVSNIHSSFATSPTGASNSKYVSADRNLIKNTAPVNTVMDSPVHLEPSSQVGVIQNKSWEMPVDRLETLSTRDFICPNSNIPDQESSLQSFCNSENKVLKENADFLSLRQTELPGNSCAQDPASFMPPQQPCSFPSQSLSDAESISKHMSLSYVANQEPGILQQKNAVQIISSALDTDNESTKDTENTFVLGDVQKTDAFVPVYSDSTIQEASPNFEKAYTLPVLPSEKDFNGSDASTQLNTHYAFSKLTYKSSSGHEVENSTTDTQVISHEKENKLESLVLTHLSRCDSDLCEMNAGMPKGNLNEQDPKHCPESEKCLLSIEDEESQQSILSSLENHSQQSTQPEMHKYGQLVKVELEENAEDDKTENQIPQRMTRNKANTMANQSKQILASCTLLSEKDSESSSPRGRIRLTEDDDPQIHHPRKRKVSRVPQPVQVSPSLLQAKEKTQQSLAAIVDSLKLDEIQPYSSERANPYFEYLHIRKKIEEKRKLLCSVIPQAPQYYDEYVTFNGSYLLDGNPLSKICIPTITPPPSLSDPLKELFRQQEVVRMKLRLQHSIEREKLIVSNEQEVLRVHYRAARTLANQTLPFSACTVLLDAEVYNVPLDSQSDDSKTSVRDRFNARQFMSWLQDVDDKFDKLKTCLLMRQQHEAAALNAVQRLEWQLKLQELDPATYKSISIYEIQEFYVPLVDVNDDFELTPI

SEQ ID NO: 378 - protein, 2608 aa, Homo sapiens
MDGRDFAPPPHLLSERGSLGHRSAAAAARLAPAGPAAQPPAHFQPGKYFPSPLPMASHTASSRLMGSSPASSFMGSFLTSSLGSAASTHPSGPSSSPPEQAYRGSHPTTSQIWFSHSHEAPGYPRFSGSLASTFLPVSHLDHHGNSNVLYGQHRFYGTQKDNFYLRNLPPQPTLLPANHNFPSVARAAPAHPMGSCSRDRDRGEAGSLQKGPKDFDRFLVGKELGREKAGKAAEGKERPAAEEDGGKERHKLVLPVPADGHCREGGPAPRGACEGRPKHLTSCLLNTKVLNGEMGRAALASCAGGMLGRPGTGVVTSGRCAKEAAGPPEPGPAFSECLERRQMLHHTASYAGPPPPLSTAAGSFPCLQLHGGPDGLCPLQDKAPRDLKASGPTFVPSVGHLADKGRPFQAAEACAVAGEGKDRHLEGTMAPDHAAPYGVSYAHLKAEGKGERRPGGFEAALNPRLKGLDYLSSAGPEASFPGLPKSGLDKSGYFELPTSSQDCARPGHQDPLGGKAPQACCTLDKTVGKEAPAGPPGAQKVARIRHQQHLMAAEVEQGGIGAEAKRKSLELASLGYSGPHLPPWGVQAGQGTAMAISEERKAGAYLDPFGSGLQQAALLPQELPAPPDEVSAMKNLLKYSSQALVVGQKAPLVGLGGLKASCIQQEAKFLSSKGPGQSERPDCARSREHDTTHGDGEVRQPPVGIAVALARQKDTVSRSEAAYGTNTARQGRAAPAFKGGGGPRSTHALDLEAEEERTRLCDDRLGLASRELLLQDSKDRVEFARIHPPSSCPGDLAPHLMMQSGQLGGDPAPHTHPHPPWLPRTRSPSLWMGGHSYGLGHPALHQNLPPGFPASVAGPVPSVFPLPQDAPTQLVILPSEPTPHSAPHALADVMDQASLWPPMYGGRGPASHMQHPGQLPVYSRPQLLRQQELYALQQQRAAQFQRKPEDQHLDLEEPAQEKAPKSTHKPVALTPTAPGAPSPAAGPTKLPPCCHPPDPKPPASSPTPPPRPSAPCTLNVCPASSPGPGSRVRSAEEKNGEGQQSTADIITSEPDLPPGYLRPMAGLGFSLPSDVHSSNLEDPETMQTTAPGAQPEPTRTFLPGEPPPCSPRSLEEPGLLSGAREATQDLAATPYPTERGPQGKAADPSPLEGLQELQCAALLEAGGPEATGQAHSTQGGAREERSREEGEQGPSSGASSQVLEQRAGSPGALEDEGEQPAPEEDELEEDELGQQSMEDSEEDCGGAPDNSHPPRALPGLDALVAATINLGDLPSDSPPDPQPPAASGPPSTVPLPHSSGIHGIALLSELADLAIQRQRSERTVPEEEEDVLAFNLQHLATLATAWSLVEAAGLDSSTAPAQPPTANPCSGPRLTPRMQILQRKDTWTPKTKPVCPLKAAIDRLDTQEVGMRVRLAELQRRYKEKQRELARLQRKHDHERDESSRSPARRGPGRPRKRKHSSSLPAPRPTGPLPRSDGKKVKAVRTSLGLLCAELRGGSGGEPAKKRSKLERSVYAGLQTASVEKAQCKKSSCQGGLAPSVAHRVAQLKPKVKSKGLPTGLSSFQQKEATPGGRIREKLSRAKSAKVSGATRHPQPKGHGSRETPRCPAQPSVAASQEAGNGYDSEDCEGLLGTEAPPREAGLLLHTGASVAVLGPSPSSVVKMEANQKAKKKKERQGLLGACRLSSPESEVKIKRRSVKAKVGTTLERAPGQRPPGALGKKKAKGKAKGSLRAEPGATPSRDALFNPSRAFACREEGSQLASERLKRATRKGTVLQPVLRRKNGALSITLATRNAKAILGKGRKLSKVKHKAGKQGKGRAVSRLLESFAVEEDFEFDDNSSFSEEEEDEEEEEEDSGPLSAEQSAALARSCAIHKEDLRDGLPVLIPKEDSLLYAGSVRTLQPPDIYSIVIEGERGNRQRIYSLEQLLQEAVLDVRPQSSRYLPPGTRVCAYWSQKSRCLYPGNVVRGASGDEDEDLDSVVVEFDDGDTGHIAVSNVRLLPPDFKIQCTEPSPALLVSSSCRRTKKVSSEAPPPSEAATPSLSPKAQDGPEALKTPGKKSISKDKAGKAELLTSGAKSPTGASDHFLGRRGSPLLSWSAVAQTKRKAVAAASKGPGVLQNLFQLNGSSKKLRAREALFPVHSVATPIFGNGFRADSFSSLASSYAPFVGGTGPGLPRGAHKLLRAKKAERVEAEKGGRRRAGGEFLVKLDHEGVTSPKNKTCKALLMGDKDFSPKLGRPLPSPSYVHPALVGKDKKGRAPIPPLPMGLALRKYAGQAEFPLPYDSDCHSSFSDEDEDGPGLAAGVPSRFLARLSVSSSSSGSSTSSSSGSVSTSSLCSSDNEDSSYSSDDEDPALLLQTCLTHPVPTLLAQPEALRSKGSGPHAHAQRCFLSRATVAGTGAGSGPSSSSKSKLKRKEALSFSKAKELSRRQRPPSVENRPKISAFLPARQLWKWSGNPTQRRGMKGKARKLFYKAIVRGEETLRVGDCAVFLSAGRPNLPYIGRIESMWESWGSNMVVKVKWFYHPEETKLGKRQCDGKNALYQSCHEDENDVQTISHKCQVVAREQYEQMARSRKCQDRQDLYYLAGTYDPTTGRLVTADGVPILC

SEQ ID NO: 379 - protein, 298 aa, Homo sapiens
MVRMVPVLLSLLLLLGPAVPQENQDGRYSLTYIYTGLSKHVEDVPAFQALGSLNDLQFFRYNSKDRKSQPMGLWRQVEGMEDWKQDSQLQKAREDIFMETLKDIVEYYNDSNGSHVLQGRFGCEIENNRSSGAFWKYYYDGKDYIEFNKEIPAWVPFDPAAQITKQKWEAEPVYVQRAKAYLEEECPATLRKYLKYSKNILDRQDPPSVVVTSHQAPGEKKKLKCLAYDFYPGKIDVHWTRAGEVQEPELRGDVLHNGNGTYQSWVVVAVPPQDTAPYSCHVQHSSLAQPLVVPWEAS

SEQ ID NO: 380 - protein, 3013 aa, Homo sapiens
MSNITIDPDVKPGEYVIKSLFAEFAVQAEKKIEVVMAEPLEKLLSRSLQRGEDLQFDQLISSMSSVAEHCLPSLLRTLFDWYRRQNGTEDESYEYRPRSSTKSKGDEQQRERDYLLERRDLAVDFIFCLVLVEVLKQIPVHPVPDPLVHEVLNLAFKHFKHKEGYSGTNTGNVHIIADLYAEVIGVLAQSKFQAVRKKFVTELKELRQKEQSPHVVQSVISLIMGMKFFRVKMYPVEDFEASFQFMQECAQYFLEVKDKDIKHALAGLFVEILIPVAAAVKNEVNVPCLKNFVEMLYQTTFELSSRKKHSLALYPLITCLLCVSQKQFFLNNWHIFLQNCLSHLKNKDPKMSRVALESLYRLLWVYVIRIKCESNTVTQSRLMSIVSALFPKGSRSVVPRDTPLNIFVKIIQFIAQERLDFAMKEIIFDLLSVGKSTKTFTINPERMNIGLRVFLVIADSLQQKDGEPPMPTTGVILPSGNTLRVKKIFLNKTLTDEEAKVIGMSVYYPQVRKALDSILRHLDKEVGRPMCMTSVQMSNKEPEDMITGERKPKIDLFRTCIAAIPRLIPDGMSRTDLIELLARLTIHMDEELRALAFNTLQALMLDFPDWREDVLSGFVYFIVREVTDVHPTLLDNAVKMLVQLINQWKQAAQMHNKNQDTQHGVANGASHPPPLERSPYSNVFHVVEGFALVILCSSRPATRRLAVSVLREIRALFALLEIPKGDDELAIDVMDRLSPSILESFIHLTGADQTTLLYCPSSIDLQTLAEWNSSPISHQFDVISPSHIWIFAHVTQGQDPWIISLSSFLKQENLPKHCSTAVSYAWMFAYTRLQLLSPQVDINSPINAKKVNTTTSSDSYIGLWRNYLILCCSAATSSSSTSAGSVRCSPPETLASTPDSGYSIDSKIIGIPSPSSLFKHIVPMMRSESMEITESLVLGLGRTNPGAFRELIEELHPIIKEALERRPENMKRRRRRDILRVQLVRIFELLADAGVISHSASGGLDNETHFLNNTLLEYVDLTRQLLEAENEKDSDTLKDIRCHFSALVANIIQNVPVHQRRSIFPQQSLRHSLFMLFSHWAGPFSIMFTPLDRYSDRNMQINRHQYCALKAMSAVLCCGPVADNVGLSSDGYLYKWLDNILDSLDKKVHQLGCEAVTLLLELNPDQSNLMYWAVDRCYTGSGRVAAGCFKAIANVFQNRDYQCDTVMLLNLILFKAADSSRSIYEVAMQLLQILEPKMFRYAHKLEVQRTDGVLSQLSPLPHLYSVSYYQLSEELARAYPELTLAIFSEISQRIQTAHPAGRQVMLHYLLPWMNNIELVDLKPLPTARRHDEDEDDSLKDRELMVTSRRWLRGEGWGSPQATAMVLNNLMYMTAKYGDELAWSEVENVWTTLADGWPKNLKIILHFLISICGVNSEPSLLPYVKKVIVYLGRDKTMQLLEELVSELQLTDPVSSGVTHMDNPPYYRITSSYKIPSVTSGTTSSSNTMVAPTDGNPDNKPIKENIEESYVHLDIYSGLNSHLNRQHHRLESRYSSSSGGSYEEEKSDSMPLYSNWRLKVMEHNQGEPLPFPPAGGCWSPLVDYVPETSSPGLPLHRCNIAVILLTDLIIDHSVKVEWGSYLHLLLHAIFIGFDHCHPEVYEHCKRLLLHLLIVMGPNSNIRTVASVLLRNKEFNEPRVLTVKQVAHLDYNFTAGINDFIPDYQPSPMTDSGLSSSSTSSSISLGNNSAAISHLHTTILNEVDISVEQDGKVKTLMEFITSRKRGPLWNHEDVSAKNPSIKSAEQLTTFLKHVVSVFKQSSSEGIHLEHHLSEVALQTALSCSSRHYAGRSFQIFRALKQPLTATTLSDVLSRLVETVGDPGEDAQGFVIELLLTLESAIDTLAETMKHYDLLSALSQTSYHDPIMGNKYAANRKSTGQLNLSTSPINSSSYLGYNSNARSNSLRLSLIGDRRGDRRRSNTLDIMDGRINHSSSLARTRSLSSLREKGMYDVQSTTEPTNLMATIFWIAASLLESDYEYEYLLALRLLNKLLIHLPLDKSESREKIENVQSKLKWTNFPGLQQLFLKGFTSASTQEMTVHLLSKLISVSKHTLVDPSQLSGFPLNILCLLPHLIQHFDSPTQFCKETASRIAKVCAEEKCPTLVNLAHMMSLYSTHTYSRDCSNWINVVCRYLHDSFSDTTFNLVTYLAELLEKGLSSMQQSLLQIIYSLLSHIDLSAAPAKQFNLEIIKIIGKYVQSPYWKEALNILKLVVSRSASLVVPSDIPKTYGGDTGSPEISFTKIFNNVSKELPGKTLDFHFDISETPIIGNKYGDQHSAAGRNGKPKVIAVTRSTSSTSSGSNSNALVPVSWKRPQLSQRRTREKLMNVLSLCGPESGLPKNPSVVFSSNEDLEVGDQQTSLISTTEDINQEEEVAVEDNSSEQQFGVFKDFDFLDVELEDAEGESMDNFNWGVRRRSLDSIDKGDTPSLQEYQCSSSTPSLNLTNQEDTDESSEEEAALTASQILSRTQMLNSDSATDETIPDHPDLLLQSEDSTGSITTEEVLQIRDETPTLEASLDNANSRLPEDTTSVLKEEHVTTFEDEGSYIIQEQQESLVCQGILDLEETEMPEPLAPESYPESVCEEDVTLALKELDERCEEEEADFSGLSSQDEEEQDGFPEVQTSPLPSPFLSAIIAAFQPVAYDDEEEAWRCHVNQMLSDTDGSSAVFTFHVFSRLFQTIQRKFGEITNEAVSFLGDSLQRIGTKFKSSLEVMMLCSECPTVFVDAETLMSCGLLETLKFGVLELQEHLDTYNVKREAAEQWLDDCKRTFGAKEDMYRINTDAQQMEILAELELCRRLYKLHFQLLLLFQAYCKLINQVNTIKNEAEVINMSEELAQLESILKEAESASENEEIDISKAAQTTIETAIHSLIETLKNKEFISAVAQVKAFRSLWPSDIFGSCEDDPVQTLLHIYFHHQTLGQTGSFAVIGSNLDMSEANYKLMELNLEIRESLRMVQSYQLLAQAKPMGNMVSTGF

SEQ ID NO: 381 - protein, 1401 aa, Homo sapiens
MEEIPVKVAVRIRPLLCKEALHNHQVCVRVIPNSQQVIIGRDRVFTFDFVFGKNSTQDEVYNTCIKPLVLSLIEGYNATVFAYGQTGSGKTYTIGGGHIASVVEGQKGIIPRAIQEIFQSISEHPSIDFNVKVSYIEVYKEDLRDLLELETSMKDLHIREDEKGNTVIVGAKECHVESAGEVMSLLEMGNAARHTGTTQMNEHSSRSHAIFTISICQVHKNMEAAEDGSWYSPRHIVSKFHFVDLAGSERVTKTGNTGERFKESIQINSGLLALGNVISALGDPRRKSSHIPYRDAKITRLLKDSLGGSAKTVMITCVSPSSSNFDESLNSLKYANRARNIRNKPTVNFSPESDRIDEMEFEIKLLREALQSQQAGVSQTTQINREGSPDTNRIHSLEEQVAQLQGECLGYQCCVEEAFTFLVDLKDTVRLNEKQQHKLQEWFNMIQEVRKAVLTSFRGIGGTASLEEGPQHVTVLQLKRELKKCQCVLAADEVVFNQKELEVKELKNQVQMMVQENKGHAVSLKEAQKVNRLQNEKIIEQQLLVDQLSEELTKLNLSVTSSAKENCGDGPDARIPERRPYTVPFDTHLGHYIYIPSRQDSRKVHTSPPMYSLDRIFAGFRTRSQMLLGHIEEQDKVLHCQFSDNSDDEESEGQEKSGTRCRSRSWIQKPDSVCSLVELSDTQDETQKSDLENEDLKIDCLQESQELNLQKLKNSERILTEAKQKMRELTINIKMKEDLIKELIKTGNDAKSVSKQYSLKVTKLEHDAEQAKVELIETQKQLQELENKDLSDVAMKVKLQKEFRKKMDAAKLRVQVLQKKQQDSKKLASLSIQNEKRANELEQSVDHMKYQKIQLQRKLREENEKRKQLDAVIKRDQQKIKEIQLKTGQEEGLKPKAEDLDACNLKRRKGSFGSIDHLQKLDEQKKWLDEEVEKVLNQRQELEELEADLKKREAIVSKKEALLQEKSHLENKKLRSSQALNTDSLKISTRLNLLEQELSEKNVQLQTSTAEEKTKISEQVEVLQKEKDQLQKRRHNVDEKLKNGRVLSPEEEHVLFQLEEGIEALEAAIEYRNESIQNRQKSLRASFHNLSRGEANVLEKLACLSPVEIRTILFRYFNKVVNLREAERKQQLYNEEMKMKVLERDNMVRELESALDHLKLQCDRRLTLQQKEHEQKMQLLLHHFKEQDGEGIMETFKTYEDKIQQLEKDLYFYKKTSRDHKKKLKELVGEAIRRQLAPSEYQEAGDGVLKPEGGGMLSEELKWASRPESMKLSGREREMDSSASSLRTQPNPQKLWEDIPELPPIHSSLAPPSGHMLGNENKTETDDNQFTKSHSRLSSQIQVVGNVGRLHGVTPVKLCRKELRQISALELSLRRSSLGVGIGSMAADSIEVSRKPRDLKT

SEQ ID NO: 382 - protein, 2623 aa, Homo sapiens
MGEKVSEAPEPVPRGCSGHGSRTPASALVAASSPGASSAESSSGSETLSEEGEPGGFSREHQPPPPPPLGGTLGARAPAAWAPASVLLERGVLALPPPLPGGAVPPAPRGSSASQEEQDEELDHILSPPPMPFRKCSNPDVASGPGKSLKYKRQLSEDGRQLRRGSLGGALTGRYLLPNPVAGQAWPASAETSNLVRMRSQALGQSAPSLTASLKELSLPRRGSFCRTSNRKSLIGNGQSPALPRPHSPLSAHAGNSPQDSPRNFSPSASAHFSFARRTDGRRWSLASLPSSGYGTNTPSSTVSSSCSSQEKLHQLPYQPTPDELHFLSKHFCTTESIATENRCRNTPMRPRSRSLSPGRSPACCDHEIIMMNHVYKERFPKATAQMEERLKEIITSYSPDNVLPLADGVLSFTHHQIIELARDCLDKSHQGLITSRYFLELQHKLDKLLQEAHDRSESGELAFIKQLVRKILIVIARPARLLECLEFDPEEFYYLLEAAEGHAKEGQGIKTDIPRYIISQLGLNKDPLEEMAHLGNYDSGTAETPETDESVSSSNASLKLRRKPRESDFETIKLISNGAYGAVYFVRHKESRQRFAMKKINKQNLILRNQIQQAFVERDILTFAENPFVVSMYCSFETRRHLCMVMEYVEGGDCATLMKNMGPLPVDMARMYFAETVLALEYLHNYGIVHRDLKPDNLLVTSMGHIKLTDFGLSKVGLMSMTTNLYEGHIEKDAREFLDKQVCGTPEYIAPEVILRQGYGKPVDWWAMGIILYEFLVGCVPFFGDTPEELFGQVISDEINWPEKDEAPPPDAQDLITLLLRQNPLERLGTGGAYEVKQHRFFRSLDWNSLLRQKAEFIPQLESEDDTSYFDTRSEKYHHMETEEEDDTNDEDFNVEIRQFSSCSHRFSKVFSSIDRITQNSAEEKEDSVDKTKSTTLPSTETLSWSSEYSEMQQLSTSNSSDTESNRHKLSSGLLPKLAISTEGEQDEAASCPGDPHEEPGKPALPPEECAQEEPEVTTPASTISSSTLSVGSFSEHLDQINGRSECVDSTDNSSKPSSEPASHMARQRLESTEKKKISGKVTKSLSASALSLMIPGDMFAVSPLGSPMSPHSLSSDPSSSRDSSPSRDSSAASASPHQPIVIHSSGKNYGFTIRAIRVYVGDSDIYTVHHIVWNVEEGSPACQAGLKAGDLITHINGEPVHGLVHTEVIELLLKSGNKVSITTTPFENTSIKTGPARRNSYKSRMVRRSKKSKKKESLERRRSLFKKLAKQPSPLLHTSRSFSCLNRSLSSGESLPGSPTHSLSPRSPTPSYRSTPDFPSGTNSSQSSSPSSSAPNSPAGSGHIRPSTLHGLAPKLGGQRYRSGRRKSAGNIPLSPLARTPSPTPQPTSPQRSPSPLLGHSLGNSKIAQAFPSKMHSPPTIVRHIVRPKSAEPPRSPLLKRVQSEEKLSPSYGSDKKHLCSRKHSLEVTQEEVQREQSQREAPLQSLDENVCDVPPLSRARPVEQGCLKRPVSRKVGRQESVDDLDRDKLKAKVVVKKADGFPEKQESHQKSHGPGSDLENFALFKLEEREKKVYPKAVERSSTFENKASMQEAPPLGSLLKDALHKQASVRASEGAMSDGRVPAEHRQGGGDFRRAPAPGTLQDGLCHSLDRGISGKGEGTEKSSQAKELLRCEKLDSKLANIDYLRKKMSLEDKEDNLCPVLKPKMTAGSHECLPGNPVRPTGGQQEPPPASESRAFVSSTHAAQMSAVSFVPLKALTGRVDSGTEKPGLVAPESPVRKSPSEYKLEGRSVSCLKPIEGTLDIALLSGPQASKTELPSPESAQSPSPSGDVRASVPPVLPSSSGKKNDTTSARELSPSSLKMNKSYLLEPWFLPPSRGLQNSPAVSLPDPEFKRDRKGPHPTARSPGTVMESNPQQREGSSPKHQDHTTDPKLLTCLGQNLHSPDLARPRCPLPPEASPSREKPGLRESSERGPPTARSERSAARADTCREPSMELCFPETAKTSDNSKNLLSVGRTHPDFYTQTQAMEKAWAPGGKTNHKDGPGEARPPPRDNSSLHSAGIPCEKELGKVRRGVEPKPEALLARRSLQPPGIESEKSEKLSSFPSLQKDGAKEPERKEQPLQRHPSSIPPPPLTAKDLSSPAARQHCSSPSHASGREPGAKPSTAEPSSSPQDPPKPVAAHSESSSHKPRPGPDPGPPKTKHPDRSLSSQKPSVGATKGKEPATQSLGGSSREGKGHSKSGPDVFPATPGSQNKASDGIGQGEGGPSVPLHTDRAPLDAKPQPTSGGRPLEVLEKPVHLPRPGHPGPSEPADQKLSAVGEKQTLSPKHPKPSTVKDCPTLCKQTDNRQTDKSPSQPAANTDRRAEGKKCTEALYAPAEGDKLEAGLSFVHSENRLKGAERPAAGVGKGFPEARGKGPGPQKPPTEADKPNGMKRSPSATGQSSFRSTALPEKSLSCSSSFPETRAGVREASAASSDTSSAKAAGGMLELPAPSNRDHRKAQPAGEGRTHMTKSDSLPSFRVSTLPLESHHPDPNTMGGASHRDRALSVTATVGETKGKDPAPAQPPPARKQNVGRDVTKPSPAPNTDRPISLSNEKDFVVRQRRGKESLRSSPHKKAL

SEQ ID NO: 383 - protein, 623 aa, Homo sapiens
MSCRQFSSSYLSRSGGGGGGGLGSGGSIRSSYSRFSSSGGGGGGGRFSSSSGYGGGSSRVCGRGGGGSFGYSYGGGSGGGFSASSLGGGFGGGSRGFGGASGGGYSSSGGFGGGFGGGSGGGFGGGYGSGFGGFGGFGGGAGGGDGGILTANEKSTMQELNSRLASYLDKVQALEEANNDLENKIQDWYDKKGPAAIQKNYSPYYNTIDDLKDQIVDLTVGNNKTLLDIDNTRMTLDDFRIKFEMEQNLRQGVDADINGLRQVLDNLTMEKSDLEMQYETLQEELMALKKNHKEEMSQLTGQNSGDVNVEINVAPGKDLTKTLNDMRQEYEQLIAKNRKDIENQYETQITQIEHEVSSSGQEVQSSAKEVTQLRHGVQELEIELQSQLSKKAALEKSLEDTKNRYCGQLQMIQEQISNLEAQITDVRQEIECQNQEYSLLLSIKMRLEKEIETYHNLLEGGQEDFESSGAGKIGLGGRGGSGGSYGRGSRGGSGGSYGGGGSGGGYGGGSGSRGGSGGSYGGGSGSGGGSGGGYGGGSGGGHSGGSGGGHSGGSGGNYGGGSGSGGGSGGGYGGGSGSRGGSGGSHGGGSGFGGESGGSYGGGEEASGSGGGYGGGSGKSSHS

SEQ ID NO: 384 - protein, 1701 aa, Homo sapiens
MGNSDSQYTLQGSKNHSNTITGAKQIPCSLKIRGIHAKEEKSLHGWGHGSNGAGYKSRSLARSCLSHFKSNQPYASRLGGPTCKVSRGVAYSTHRTNAPGKDFQGISAAFSTENGFHSVGHELADNHITSRDCNGHLLNCYGRNESIASTPPGEDRKSPRVLIKTLGKLDGCLRVEFHNGGNPSKVPAEDCSEPVQLLRYSPTLASETSPVPEARRGSSADSLPSHRPSPTDSRLRSSKGSSLSSESSWYDSPWGNAGELSEAEGSFLAPGMPDPSLHASFPPGDAKKPFNQSSSLSSLRELYKDANLGSLSPSGIRLSDEYMGTHASLSNRVSFASDIDVPSRVAHGDPIQYSSFTLPCRKPKAFVEDTAKKDSLKARMRRISDWTGSLSRKKRKLQEPRSKEGSDYFDSRSDGLNTDVQGSSQASAFLWSGGSTQILSQRSESTHAIGSDPLRQNIYENFMRELEMSRTNTENIETSTETAESSSESLSSLEQLDLLFEKEQGVVRKAGWLFFKPLVTVQKERKLELVARRKWKQYWVTLKGCTLLFYETYGKNSMDQSSAPRCALFAEDSIVQSVPEHPKKENVFCLSNSFGDVYLFQATSQTDLENWVTAVHSACASLFAKKHGKEDTLRLLKNQTKNLLQKIDMDSKMKKMAELQLSVVSDPKNRKAIENQIQQWEQNLEKFHMDLFRMRCYLASLQGGELPNPKSLLAAASRPSKLALGRLGILSVSSFHALVCSRDDSALRKRTLSLTQRGRNKKGIFSSLKGLDTLARKGKEKRPSITQVDELLHIYGSTVDGVPRDNAWEIQTYVHFQDNHGVTVGIKPEHRVEDILTLACKMRQLEPSHYGLQLRKLVDDNVEYCIPAPYEYMQQQVYDEIEVFPLNVYDVQLTKTGSVCDFGFAVTAQVDERQHLSRIFISDVLPDGLAYGEGLRKGNEIMTLNGEAVSDLDLKQMEALFSEKSVGLTLIARPPDTKATLCTSWSDSDLFSRDQKSLLPPPNQSQLLEEFLDNFKKNTANDFSNVPDITTGLKRSQTDGTLDQVSHREKMEQTFRSAEQITALCRSFNDSQANGMEGPRENQDPPPRPLARHLSDADRLRKVIQELVDTEKSYVKDLSCLFELYLEPLQNETFLTQDEMESLFGSLPEMLEFQKVFLETLEDGISASSDFNTLETPSQFRKLLFSLGGSFLYYADHFKLYSGFCANHIKVQKVLERAKTDKAFKAFLDARNPTKQHSSTLESYLIKPVQRVLKYPLLLKELVSLTDQESEEHYHLTEALKAMEKVASHINEMQKIYEDYGTVFDQLVAEQSGTEKEVTELSMGELLMHSTVSWLNPFLSLGKARKDLELTVFVFKRAVILVYKENCKLKKKLPSNSRPAHNSTDLDPFKFRWLIPISALQVRLGNPAGTENNSIWELIHTKSEIEGRPETIFQLCCSDSESKTNIVKVIRSILRENFRRHIKCELPLEKTCKDRLVPLKNRVPVSAKLASSRSLKVLKNSSSNEWTGETGKGTLLDSDEGSLSSGTQSSGCPTAEGRQDSKSTSPGKYPHPGLADFADNLIKESDILSDEDDDHRQTVKQGSPTKDIEIQFQRLRISEDPDVHPEAEQQPGPESGEGQKGGEQPKLVRGHFCPIKRKANSTKRDRGTLLKAQIRHQSLDSQSENATIDLNSVLEREFSVQSLTSVVSEECFYETESHGKS

SEQ ID NO: 385 - protein, 2177 aa, Homo sapiens
MEEILRKLQKEASGSKYKAIKESCTWALETLGGLDTIVKIPPHVLREKCLLPLQLALESKNVKLAQHALAGMQKLLSEERFVSMETDSDEKQLLNQILNAVKVTPSLNEDLQVEVMKVLLCITYTPTFDLNGSAVLKIAEVCIETYISSCHQRSINTAVRATLSQMLSDLTLQLRQRQENTIIENPDVPQDFGNQGSTVESLCDDVVSVLTVLCEKLQAAINDSQQLQLLYLECILSVLSSSSSSMHLHRRFTDLIWKNLCPALIVILGNPIHDKTITSAHTSSTSTSLESDSASPGVSDHGRGSGCSCTAPALSGPVARTIYYIAAELVRLVGSVDSMKPVLQSLYHRVLLYPPPQHRVEAIKIMKEILGSPQRLCDLAGPSSTESESRKRSISKRKSHLDLLKLIMDGMTEACIKGGIEACYAAVSCVCTLLGALDELSQGKGLSEGQVQLLLLRLEELKDGAEWSRDSMEINEADFRWQRRVLSSEHTPWESGNERSLDISISVTTDTGQTTLEGELGQTTPEDHSGNHKNSLKSPAIPEGKETLSKVLETEAVDQPDVVQRSHTVPYPDITNFLSVDCRTRSYGSRYSESNFSVDDQDLSRTEFDSCDQYSMAAEKDSGRSDVSDIGSDNCSLADEEQTPRDCLGHRSLRTAALSLKLLKNQEADQHSARLFIQSLEGLLPRLLSLSNVEEVDTALQNFASTFCSGMMHSPGFDGNSSLSFQMLMNADSLYTAAHCALLLNLKLSHGDYYRKRPTLAPGVMKDFMKQVQTSGVLMVFSQAWIEELYHQVLDRNMLGEAGYWGSPEDNSLPLITMLTDIDGLESSAIGGQLMASAATESPFAQSRRIDDSTVAGVAFARYILVGCWKNLIDTLSTPLTGRMAGSSKGLAFILGAEGIKEQNQKERDAICMSLDGLRKAARLSCALGVAANCASALAQMAAASCVQEEKEEREAQEPSDAITQVKLKVEQKLEQIGKVQGVWLHTAHVLCMEAILSVGLEMGSHNPDCWPHVFRVCEYVGTLEHNHFSDGASQPPLTISQPQKATGSAGLLGDPECEGSPPEHSPEQGRSLSTAPVVQPLSIQDLVREGSRGRASDFRGGSLMSGSSAAKVVLTLSTQADRLFEDATDKLNLMALGGFLYQLKKASQSQLFHSVTDTVDYSLAMPGEVKSTQDRKSALHLFRLGNAMLRIVRSKARPLLHVMRCWSLVAPHLVEAACHKERHVSQKAVSFIHDILTEVLTDWNEPPHFHFNEALFRPFERIMQLELCDEDVQDQVVTSIGELVEVCSTQIQSGWRPLFSALETVHGGNKSEMKEYLVGDYSMGKGQAPVFDVFEAFLNTDNIQVFANAATSYIMCLMKFVKGLGEVDCKEIGDCAPAPGAPSTDLCLPALDYLRRCSQLLAKIYKMPLKPIFLSGRLAGLPRRLQEQSASSEDGIESVLSDFDDDTGLIEVWIILLEQLTAAVSNCPRQHQPPTLDLLFELLRDVTKTPGPGFGIYAVVHLLLPVMSVWLRRSHKDHSYWDMASANFKHAIGLSCELVVEHIQSFLHSDIRYESMINTMLKDLFELLVACVAKPTETISRVGCSCIRYVLVTAGPVFTEEMWRLACCALQDAFSATLKPVKDLLGCFHSGTESFSGEGCQVRVAAPSSSPSAEAEYWRIRAMAQQVFMLDTQCSPKTPNNFDHAQSCQLIIELPPDEKPNGHTKKSVSFREIVVSLLSHQVLLQNLYDILLEEFVKGPSPGEEKTIQVPEAKLAGFLRYISMQNLAVIFDLLLDSYRTAREFDTSPGLKCLLKKVSGIGGAANLYRQSAMSFNIYFHALVCAVLTNQETITAEQVKKVLFEDDERSTDSSQQCSSEDEDIFEETAQVSPPRGKEKRQWRARMPLLSVQPVSNADWVWLVKRLHKLCMELCNNYIQMHLDLENCMEEPPIFKGDPFFILPSFQSESSTPSTGGFSGKETPSEDDRSQSREHMGESLSLKAGGGDLLLPPSPKVEKKDPSRKKEWWENAGNKIYTMAADKTISKLMTEYKKRKQQHNLSAFPKEVKVEKKGEPLGPRGQDSPLLQRPQHLMDQGQMRHSFSAGPELLRQDKRPRSGSTGSSLSVSVRDAEAQIQAWTNMVLTVLNQIQILPDQTFTALQPAVFPCISQLTCHVTDIRVRQAVREWLGRVGRVYDIIV

SEQ ID NO: 386 - protein, 1896 aa, Homo sapiens
MPLPPRSLQVLLLLLLLLLLLPGMWAEAGLPRAGGGSQPPFRTFSASDWGLTHLVVHEQTGEVYVGAVNRIYKLSGNLTLLRAHVTGPVEDNEKCYPPPSVQSCPHGLGSTDNVNKLLLLDYAANRLLACGSASQGICQFLRLDDLFKLGEPHHRKEHYLSSVQEAGSMAGVLIAGPPGQGQAKLFVGTPIDGKSEYFPTLSSRRLMANEEDADMFGFVYQDEFVSSQLKIPSDTLSKFPAFDIYYVYSFRSEQFVYYLTLQLDTQLTSPDAAGEHFFTSKIVRLCVDDPKFYSYVEFPIGCEQAGVEYRLVQDAYLSRPGRALAHQLGLAEDEDVLFTVFAQGQKNRVKPPKESALCLFTLRAIKEKIKERIQSCYRGEGKLSLPWLLNKELGCINSPLQIDDDFCGQDFNQPLGGTVTIEGTPLFVDKDDGLTAVAAYDYRGRTVVFAGTRSGRIRKILVDLSNPGGRPALAYESVVAQEGSPILRDLVLSPNHQYLYAMTEKQVTRVPVESCVQYTSCELCLGSRDPHCGWCVLHSICSRRDACERADEPQRFAADLLQCVQLTVQPRNVSVTMSQVPLVLQAWNVPDLSAGVNCSFEDFTESESVLEDGRIHCRSPSAREVAPITRGQGDQRVVKLYLKSKETGKKFASVDFVFYNCSVHQSCLSCVNGSFPCHWCKYRHVCTHNVADCAFLEGRVNVSEDCPQILPSTQIYVPVGVVKPITLAARNLPQPQSGQRGYECLFHIPGSPARVTALRFNSSSLQCQNSSYSYEGNDVSDLPVNLSVVWNGNFVIDNPQNIQAHLYKCPALRESCGLCLKADPRFECGWCVAERRCSLRHHCAADTPASWMHARHGSSRCTDPKILKLSPETGPRQGGTRLTITGENLGLRFEDVRLGVRVGKVLCSPVESEYISAEQIVCEIGDASSVRAHDALVEVCVRDCSPHYRALSPKRFTFVTPTFYRVSPSRGPLSGGTWIGIEGSHLNAGSDVAVSVGGRPCSFSWRNSREIRCLTPPGQSPGSAPIIININRAQLTNPEVKYNYTEDPTILRIDPEWSINSGGTLLTVTGTNLATVREPRIRAKYGGIERENGCLVYNDTTMVCRAPSVANPVRSPPELGERPDELGFVMDNVRSLLVLNSTSFLYYPDPVLEPLSPTGLLELKPSSPLILKGRNLLPPAPGNSRLNYTVLIGSTPCTLTVSETQLLCEAPNLTGQHKVTVRAGGFEFSPGTLQVYSDSLLTLPAIVGIGGGGGLLLLVIVAVLIAYKRKSRDADRTLKRLQLQMDNLESRVALECKEAFAELQTDIHELTNDLDGAGIPFLDYRTYAMRVLFPGIEDHPVLKEMEVQANVEKSLTLFGQLLTKKHFLLTFIRTLEAQRSFSMRDRGNVASLIMTALQGEMEYATGVLKQLLSDLIEKNLESKNHPKLLLRRTESVAEKMLTNWFTFLLYKFLKECAGEPLFMLYCAIKQQMEKGPIDAITGEARYSLSEDKLIRQQIDYKTLTLNCVNPENENAPEVPVKGLDCDTVTQAKEKLLDAAYKGVPYSQRPKAADMDLEWRQGRMARIILQDEDVTTKIDNDWKRLNTLAHYQVTDGSSVALVPKQTSAYNISNSSTFTKSLSRYESMLRTASSPDSLRSRTPMITPDLESGTKLWHLVKNHDHLDQREGDRGSKMVSEIYLTRLLATKGTLQKFVDDLFETIFSTAHRGSALPLAIKYMFDFLDEQADKHQIHDADVRHTWKSNCLPLRFWVNVIKNPQFVFDIHKNSITDACLSVVAQTFMDSCSTSEHKLGKDSPSNKLLYAKDIPNYKSWVERYYADIAKMPAISDQDMSAYLAEQSRLHLSQFNSMSALHEIYSYITKYKDEILAALEKDEQARRQRLRSKLEQVVDTMALSS

SEQ ID NO: 387 - protein, 2319 aa, Homo sapiens
MLTMSVTLSPLRSQDLDPMATDASPMAINMTPTVEQGEGEEAMKDMDSDQQYEKPPPLHTGADWKIVLHLPEIETWLRMTSERVRDLTYSVQQDSDSKHVDVHLVQLKDICEDISDHVEQIHALLETEFSLKLLSYSVNVIVDIHAVQLLWHQLRVSVLVLRERILQGLQDANGNYTRQTDILQAFSEETKEGRLDSLTEVDDSGQLTIKCSQNYLSLDCGITAFELSDYSPSEDLLSGLGDMTSSQVKTKPFDSWSYSEMEKEFPELIRSVGLLTVAADSISTNGSEAVTEEVSQVSLSVDDKGGCEEDNASAVEEQPGLTLGVSSSSGEALTNAAQPSSETVQQESSSSSHHDAKNQQPVPCENATPKRTIRDCFNYNEDSPTQPTLPKRGLFLKEETFKNDLKGNGGKRQMVDLKPEMSRSTPSLVDPPDRSKLCLVLQSSYPNSPSAASQSYECLHKVGNGNLENTVKFHIKEISSSLGRLNDCYKEKSRLKKPHKTSEEVPPCRTPKRGTGSGKQAKNTKSSAVPNGELSYTSKAIEGPQTNSASTSSLEPCNQRSWNAKLQLQSETSSSPAFTQSSESSVGSDNIMSPVPLLSKHKSKKGQASSPSHVTRNGEVVEAWYGSDEYLALPSHLKQTEVLALKLENLTKLLPQKPRGETIQNIDDWELSEMNSDSEIYPTYHVKKKHTRLGRVSPSSSSDIASSLGESIESGPLSDILSDEESSMPLAGMKKYADEKSERASSSEKNESHSATKSALIQKLMQDIQHQDNYEAIWEKIEGFVNKLDEFIQWLNEAMETTENWTPPKAEMDDLKLYLETHLSFKLNVDSHCALKEAVEEEGHQLLELIASHKAGLKDMLRMIASQWKELQRQIKRQHSWILRALDTIKAEILATDVSVEDEEGTGSPKAEVQLCYLEAQRDAVEQMSLKLYSEQYTSSSKRKEEFADMSKVHSVGSNGLLDFDSEYQELWDWLIDMESLVMDSHDLMMSEEQQQHLYKRYSVEMSIRHLKKTELLSKVEALKKGGVLLPNDLLEKVDSINEKWELLGKTLGEKIQDTMAGHSGSSPRDLLSPESGSLVRQLEVRIKELKGWLRDTELFIFNSCLRQEKEGTMNTEKQLQYFKSLCREIKQRRRGVASILRLCQHLLDDRETCNLNADHQPMQLIIVNLERRWEAIVMQAVQWQTRLQKKMGKESETLNVIDPGLMDLNGMSEDALEWDEMDISNKLISLNEESNDLDQELQPVIPSLKLGETSNEDPGYDEEADNHGGSQYASNITAPSSPHIYQVYSLHNVELYEDNHMPFLKNNPKVTGMTQPNVLTKSLSKDSSFSSTKSLPDLLGGSNLVKPCACHGGDMSQNSGSESGIVSEGDTETTTNSEMCLLNAVDGSPSNLETEHLDPQMGDAVNVLKQKFTDEGESIKLPNSSQSSISPVGCVNGKVGDLNSITKHTPDCLGEELQGKHDVFTFYDYSYLQGSKLKLPMIMKQSQSEKAHVEDPLLRGFYFDKKSCKSKHQTTELQPDVPPHERILASASHEMDRISYKSGNIEKTFTGMQNAKQLSLLSHSSSIESLSPGGDLFGLGIFKNGSDSLQRSTSLESWLTSYKSNEDLFSCHSSGDISVSSGSVGELSKRTLDLLNRLENIQSPSEQKIKRSVSDITLQSSSQKMSFTGQMSLDIASSINEDSAASLTELSSSDELSLCSEDIVLHKNKIPESNASFRKRLTRSVADESDVNVSMIVNVSCTSACTDDEDDSDLLSSSTLTLTEEELCIKDEDDDSSIATDDEIYEDCTLMSGLDYIKNELQTWIRPKLSLTRDKKRCNVSDEMKGSKDISSSEMTNPSDTLNIETLLNGSVKRVSENNGNGKNSSHTHELGTKRENKKTIFKVNKDPYVADMENGNIEGIPERQKGKPNVTSKVSENLGSHGKEISESEHCKCKALMDSLDDSNTAGKEFVSQDVRHLPKKCPNHHHFENQSTASTPTEKSFSELALETRFNNRQDSDALKSSDDAPSMAGKSAGCCLALEQNGTEENASISNISCCNCEPDVFHQKDAEDCSVHNFVKEIIDMASTALKSKSQPENEVAAPTSLTQIKEKVLEHSHRPIQLRKGDFYSYLSLSSHDSDCGEVTNYIEEKSSTPLPLDTTDSGLDDKEDIECFFEACVEGDSDGEEPCFSSAPPNESAVPSEAAMPLQATACSSEFSDSSLSADDADTVALSSPSSQERAEVGKEVNGLPQTSSGCAENLEFTPSKLDSEKESSGKPGESGMPEEHNAASAKSKVQDLSLKANQPTDKAALHPSPKTLTCEENLLNLHEKRHRNMHR

SEQ ID NO: 388 - protein, 2649 aa, Homo sapiens
MAVWEAEQLGGLQRGDLLTPPAPDGDGRTAPLGQPPGAQLYCPACLVTCHSQEAFENHCASSEHAQMVAFDQALPWEHRSPPPGLSKFELCPKPDLCEYGDACTKAHSAQELQEWVRRTQAVELRGQAAWQDGLVPYQERLLAEYQRSSSEVLVLAETLDGVRVTCNQPLMYQAQERKTQYSWTFAVHSEEPLLHVALLKQEPGADFSLVAPGLPPGRLYARGERFRVPSSTADFQVGVRVQAASFGTFEQWVVFDFGRRPVLLQKLGLQLGQGRRPGPCRNLALGHPEEMERWHTGNRHVVPGVERTAEQTALMAKYKGPALALEFNRSSVASGPISPTNYRQRMHQFLYEEEAAQQQLVAKLTLRGQVFLKTALQTPALNMLFAPPGALYAEVPVPSSLMPDTDQGFLLGRAVSTALVAPVPAPDNTVFEVRLERRASSEQALWLLLPARCCLALGLQPEARLVLEVQFQIDPMTFRLWHQAVDTLPEEQLVVPDLPTCALPRPWSVPPLRRGNRKQELAVALIAGWGPGDGRRVPPLLIYGPFGTGKTYTLAMASLEVIRRPETKVLICTHTNSAADIYIREYFHSHVSGGHPEATPLRVMYTDRPLSQTDPVTLQYCCLTDDRQAFRPPTRAELARHRVVVTTTSQARELRVPVGFFSHILIDEAAQMLECEALTPLAYASHGTRLVLAGDHMQVTPRLFSVARARAAEHTLLHRLFLCYQQETHEVARQSRLVFHENYRCTDAIVSFISRHFYVAKGNPIHARGKVPPHPRHYPLMFCHVAGSPDRDMSMASWLNLAEIAQVVEKVQEAYNTWPSCWGGREQRCICVVSHGAQVSALRQELRRRDLGQVSVGSFEILPGRQFRVVVLSTVHTCQSLLSPGALAPEFFTDARVLNTVLTRAQSQLVVVGDAVALCSFGACGKLWESFIRECVERHSVCPEGLSMEQVEQGVAQRRRWPPRGTQAGAAGNWEAAPEPVGDLAEEQAAVVTAMVKAEPGDEALSPASRDITATTAQTEAAAAPAGDAVKEDVVPGACAAGAAAAAGVESTEAEDAEADFWPWDGELNADDAILRELLDESQKVMVTVGEDGLLDTVARPESLQQARLYENLPPAALRKLLHAEPERYRHCSFVPETFERASAIPLDDASSGPIQVRGRLDCGMAFAGDEVLVQLLSGDKAPEGRLRGRVLGVLKRKRHELAFVCRMDTWDPRIMVPINGSVTKIFVAELKDPSQVPIYSLRKGRLQRVGLERLTAEARHSRLFWVQIVLWRQGFYYPLGIVREVLPEASTWEQGLRILGLEYSLRVPPSDQATITKVLQKYHTELGRVAGRREDCRAFLTFTVDPQGACNLDDALSVRDLGPRCEVAVHITDVASFVPRDGVLDVEARRQGAAFYAPGREPVPMLPASLCQDVLSLLPGRDRLAISLFLTMEKASGQLKSLRFAPSVVQSDRQLSYEEAEEVIRQHPGAGRELPARLDSVDACVVAACYFSRLLRRHRLRSDCFYEQPDEDGTLGFRAAHIMVKEYMIQFNRLVAEFLVGSECTRTVTPLRWQPAPRSQQLKALCEKHGDRVPLSLHLGHHLHGGGGSPPDTRLHLLASLWKQVQFAARTQDYEQMVDLVTTDDMHPFLAPAGRDLRKALERSAFGRCARGHQQQGGHYSLQVDWYTWATSPIRRYLDVVLQRQILLALGHGGSAYSARDIDGLCQAFSLQHALAQSYQRRARSLHLAVQLKAQPLDKLGFVVDVEAGSRCFRLLFPSNRETLPDPCPVPYGSLQLAEHPHALAGRPGLRLLWRRRVYSAQGSSPPLPLPGTVPDPHTLAVETALWKQLLELVELQRWPEAAALIQEKGEASQRRELVQVQRSHCGHFLEVARELGSGDTLQVQLGTSLQHGFLVPSPQLWTVAPGFSLCLEHVERPGDCFSGRVYRAPRDRYRDVDEYACVWEPFCALESATGAVAENDSVTLQHLSVSWEASRTPQGQLQGAFRLEAAFLEENCADINFSCCYLCIRLEGLPAPTASPRPGPSSLGPGLNVDPGTYTWVAHGQTQDWDQERRADRQEAPRRVHLFVHHMGMEKVPEEVLRPGTLFTVELLPKQLPDLRKEEAVRGLEEASPLVTSIALGRPVPQPLCRVIPSRFLERQTYNIPGGRHKLNPSQNVAVREALEKPFTVIQGPPGTGKTIVGLHIVFWFHKSNQEQVQPGGPPRGEKRLGGPCILYCGPSNKSVDVLAGLLLRRMELKPLRVYSEQAEASEFPVPRVGSRKLLRKSPREGRPNQSLRSITLHHRIRQAPNPYSSEIKAFDTRLQRGELFSREDLVWYKKVLWEARKFELDRHEVILCTCSCAASASLKILDVRQILVDEAGMATEPETLIPLVQFPQAEKVVLLGDHKQLRPVVKNERLQNLGLDRSLFERYHEDAHMLDTQYRMHEGICAFPSVAFYKSKLKTWQGLRRPPSVLGHAGKESCPVIFGHVQGHERSLLVSTDEGNENSKANLEEVAEVVRITKQLTLGRTVEPQDIAVLTPYNAQASEISKALRREGIAGVAVSSITKSQGSEWRYVLVSTVRTCAKSDLDQRPTKSWLKKFLGFVVDPNQVNVAVTRAQEGLCLIGDHLLLRCCPLWRSLLDFCEAQQTLVPAGQVRVCRRPTMPS

SEQ ID NO: 389 - protein, 3092 aa, Homo sapiens
MSDANKAAIAAEKEALNLKLPPIVHLPENIGVDTPTQSKLLKYRRSKEQQQKINQLVIDGAKRNLDRTLGKRTPLLPPPDYPQTMTSEMKKKGFNYIYMKQCVESSPLVPIQQEWLDHMLRLIPESLKEGKEREELLESLINEVSSDFENSMKRYLVQSVLVKPPVKSLEDEGGPLPESPVGLDYSNPWHSSYVQARNQIFSNLHIIHPTMKMLLDLGYTTFADTVLLDFTGIRAKGPIDCESLKTDLSIQTRNAEEKIMNTWYPKVINLFTKKEALEGVKPEKLDAFYSCVSTLMSNQLKDLLRRTVEGFVKLFDPKDQQRLPIFKIELTFDDDKMEFYPTFQDLEDNVLSLVERIAEALQNVQTIPSWLSGTSTPVNLDTELPEHVLHWAVDTLKAAVHRNLEGARKHYETYVEKYNWLLDGTAVENIETFQTEDHTFDEYTEFIEKFLSLASEIMLLPQWIHYTMVRLDCEDLKTGLTNKAKAFANILLNDIASKYRKENECICSEFEAIKEHALKVPETTEEMMDLISYVEKARTVGIEELILRIQESKRQMSYFLDVFLFPQEDLALNATVLMWPRKINPIFDENDELIENAKHKKENELMAKREKLILEIEKESRRMEEFTEFAELERMQQYVTDVRQLQKRIQESEEAVQFINKEEELFKWELTKYPELDKLKVNIEPYQKFFNFVLKWQRSEKRWMDGGFLDLNGESMEADVEEFSREIFKTLKFFQTKLKKELQEKRKAARKRSLEEEKIEEEPKDNATITMCRMRARHWKQISEIVGYDLTPDSGTTLRKVLKLNLTPYLEQFEVISAGASKEFSLEKAMNTMIGTWEDIAFHISLYRDTGVCILSSVDEIQAILDDQIIKTQTMRGSPFIKPFEHEIKAWEDRLIRIQETIDEWLKVQAQWLYLEPIFCSEDIMQQMPEEGRQFQTVDRHWRDIMKFCAKDPKVLAATSLTGLLEKLQNCNELLEKIMKGLNAYLEKKRLFFPRFFFLSNDEMLEILSETKDPLRVQPHLKKCFEGIAKLEFLPNLDIKAMYSSEGERVELIALISTSAARGAVEKWLIQVEDLMLRSVHDVIAAARLAYPESARRDWVREWPGQVVLCISQMFWTSETQEVISGGTEGLKKYYKELQNQLNEIVELVRGKLSKQTRTTLGALVTIDVHARDVVMDMIKMGVSHDTDFLWLAQLRYYWENENARVRIINCNVKYAYEYLGNSPRLVITPLTDRCYRTLIGAFYLNLGGAPEGPAGTGKTETTKDLAKALAVQCVVFNCSDGLDYLAMGKFFKGLASSGAWACFDEFNRIELEVLSVVAQQILCIQRAIQQKLVVFVFEGTELKLNPNCFVAITMNPGYAGRSELPDNLKVLFRTVAMMVPNYALIAEISLYSYGFLNARPLSVKIVMTYRLCSEQLSSQFHYDYGMRAVKAVLVAAGNLKLKYPNENEDILLLRSIKDVNEPKFLSHDIPLFNGITSDLFPGIKLPEADYHEFLECAHEACNVHNLQPVKFFLEKIIQTYEMMIVRHGFMLVGEPFAAKTKVLHVLADTLTLMNEHGYGEEEKVIYRTVNPKSITMGQLFGQFDPVSHEWTDGIVANTFREFALSETPDRKWVVFDGPIDTLWIESMNTVLDDNKKLCLMSGEIIQMSPQMSLIFETMDLSQASPATVSRCGMIYLEPSQLGWEPLVSSWLNSLKGPLCEPEYQALLRGLFAWLIPPSLNQRVELFQLNYLYTTIVSKILKILITFRISNYFKYVPLKTQCTFIKFFLHQQACFIFSLIWSIGGSCDTDGRRVFDTFIRLIILGKDDENPVPDSVGKWECPFDEKGLVYDYMYELKNKGRWVHWNELIKNTNLGDKQIKIQDIIVPTMDTIRYTFLMDLSITYAKPLLFVGPTGTGKSVYVKDKLMNHLEKDQYFPFYINLSARTSANQVQNIIMARLDKRRKGVFGPPMGKKCIIFIDDMNMPALEKYGAQPPIELLRQFFDCGHWYDLKDTSKITLVDIELIAAMGPPGGGRNPVTPRCIRHFNICSINSFSDETMVRIFSSIVAFYLRTHEFPPEYFVIGNQIVNGTMEIYKQSVENLLPTPTKSHYTFNLRDFSRVIRGCLLIERDAVANKHTMIRLFVHEVLRVFYDRLINDDDRRWLFQLTKTVIKDHFKESFHSIFSHLRKQNAPVTEEDLRNLMFGDYMNPDLEGDDRVYIEIPNIHHFSDVVDQCLDEYNQTHKTRMNLVIFRYVLEHLSRICRVLKQSGGNALLVGLGGSGRQSLTRLATSMAKMHIFQPEISKSYGMNEWREDMKSFIAVPVTNRIVDNKSKILEKRLRYLNDHFTYNLYCNICRSLFEKDKLLFSFLLCANLLLARKEIEYQELMFLLTGGVSLKSAEKNPDPTWLQDKSWEEICRASEFPAFRGLRQHFCEHIYEWREIYDSKEPHNAKFPAPMDKNLNELQKIIILRCLRPDKITPAITNYVTDKLGKKFVEPPPFDLTKSYLDSNCTIPLIFVLSPGADPMASLLKFANDKSMSGNKFQAISLGQGQGPIAAKMIKAAIEEGTWVCLQNCHLAVSWMPMLEKICEDFTSETCNSSFRLWLTSYPSSKFPVTILQNGVKMTNEPPTGLRLNLLQSYLTDPVSDPEFFKGCRGKELAWEKLLFGVCFFHALVQERKKFGPLGWNIPYGFNESDLRISIRQLQLFINEYDTIPFEAISYLTGECNYGGRVTDDWDRRLLLTMLADFYNLYIVENPHYKFSPSGNYFAPPKGTYEDYIEFIKKLPFTQHPEIFGLHENVDISKDLQQTKTLFESLLLTQGGSKQTGASGSTDQILLEITKDILNKLPSDFDIEMALRKYPVRYEESMNTVLVQEMERFNNLIITIRNTLRDLEKAIKGVVVMDSALEALSGSLLVGKVPEIWAKRSYPSLKPLGSYITDFLARLNFLQDWYNSGKPCVFWLSGFFFTQAFLTGAMQNYARKYTTPIDLLGYEFEVIPSDTSDTSPEDGVYIHGLYLDGARWDRESGLLAEQYPKLLFDLMPIIWIKPTQKSRIIKSDAYVCPLYKTSERKGTLSTTGHSTNFVIAMLLKTDQPTRHWIKRGVALLCQLDD

SEQ ID NO: 390 - protein, 3375 aa, Homo sapiens
MASERPEPEVEEAGQVFLLMKKDYRISRNVRLAWFLSHLHQTVQATPQEMLLQSEQELEVLSVLPPGWQPDEPVVPRPFLLVPSTRVTFLAWQYRFVIELDLSPSTGIVDDSTGEILFDEVFHALSRCLGGLLRPFRVPGSCIDFQPEIYVTIQAYSSIIGLQSHQVLVQGCLLDPSQREVFLQQIYEQLCLFEDKVATMLQQQYDPQSQAEDQSPDSGDLLGRKVGVSMVTADLGLVSMIRQGILALQLLPSNSSAGIIVITDGVTSVPDVAVCETLLNQLRSGTVACSFVQVGGVYSYDCSFGHVPNVELMKFIAMATFGSYLSTCPEPEPGNLGLTVYHRAFLLYSFLRSGEALNPEYYCGSQHRLFNEHLVSASSNPALALRRKKHTEKEVPADLVSTVSVRLREGYSVREVTLAKGGSQLEVKLVLLWKHNMRIEYVAMAPWPLEPEGPRVTRVEVTMEGGYDILHDVSCALRQPIRSLYRTHVIRRFWNTLQSINQTDQMLAHLQSFSSVPEHFTLPDSTKSGVPLFYIPPGSTTPVLSLQPSGSDSSHAQFAAYWKPVLSMDANSWQRWLHMHRLVLILEHDTPIPKHLHTPGSNGRYSTIQCRISHSSLTSLLRDWSSFVLVEGYSYVKLLSSAPDQPPNSFYMVRIISKAPCMVLRLGFPIGTPAPARHKIVSGLREEILRLRFPHRVQSKEPTPKVKRKGLGGAGGGSSPSKSPPVLGPQQALSDRPCLVVLHKPLDKLLIRYEKLPLDYRAPFLLTLEPPGPLPLVSGRSASSSLASLSRYLYHQRWLWSVPSGLAPALPLSAIAQLLSILTEVRLSEGFHFACSGEGIINMVLELPIQNEPPGQAAAEEKHTCVVQYILFPPHSTSTKDSFSTDDDNDVEVEALEGDSELNLVTEVWVEPQYGRVGPGPGIWKHLQDLTYSEIPQALHPRDAACIGSMLSFEYLIQLCQSKEWGPLPPEPRVSDGLDQGGDTCVHEIPFHFDLMGLLPQCQQLQMFFLLLARGAEGPLLGVHGIPKEQAVGSTQATGDSAFTSLSVGLPETLKPLISAQPPQWRCYARLVNPQHVFLTFLPATFSDVQRLAACGLEGPPQEETKPKFGDWSGAPSLKDLGGTGIKATKSHVPVLSVTLASDNAQNQGELSPPFRRDLQAYAGRQASQTESADGPRTRCPVYIYSCSLEALREQMVGMQPPQAPRDLIFRTQFLDHPSPSSAWMEPRYKEAANHCALLQEHAQRCYVRGLFRSLQQAQSVTSQDLLTAVDACEELLQEIDITPFLLALCGHTWGLPHAPPSPGPLSPGPFSSSMEEGAEPRERAILASESSIETEDLSEPEFQSTRVPGIPDPGPEISLTDVCQLRGEAHGALHSVIQEKFLEISRLHFRTVPSNPHYFFYCPPSSRREDEGPRDTVDRKISDLEFSEAELMGEEGDTSACCVVTESDPELEVEYRESRESDLGPAGLDSASLSDVDTVNPDEDSFSILGGDSPTGPESFLHDLPPLFLHLTCSVRLRGQHSSVPVCSLPTCLGQVLSSLEGPPVGGRVPLRDLSVTLDVFMLTLPLEVELPTASDPQHHRSTSESSASFPRSPGQPSSLRSDDGLGPPLPPPEEERHPGLSNLATPHRLAIETTMNEIRWLLEDEMVGALRRGGIPQSPALHRAAAHIHSSPGRSTCLRQTLPLSFVFGPERSLTQFKEEFRRLHLPGHVLLEDPDSGFFFVAAGQQPGGSHGEPSSAAWAWHSHEDRAEGIEGETLTASPQAPGSPEDSEGVPLISLPRVPQGGSQPGPSRGLSLMSSQGSVDSDHLGYDGGSSGSDSEGPNDTLGEKAPFTLRTPPGPAPPQPSLSGLPGPCLPDFWLIVRVLQDRVEVYAHARSLIREDGGPGTECRHLQQLLVRRVGEICREVNQRLLLQDLHDSHVCNSLLVAESEEDLWRSETPFHSRQRAPLPSDDYAADESCAPRGYLAATMQFVPGHFSCDVVWGTVIRVHSRLKMGPSMGVSRAIQALRSVLNAFSVVNRKNMFVYQERATKAVYYLRLLETSCSDRPWKGDALPPSLALSRSQEPIYSEEASGPRSPLDMVSSRSSDAARPVGQVDRHIQLLVHGVGQAGPEITDELVRVLCRRLDEATLDVITVMLVRNCKLTPADVEFIQPPGSLPSEVLHLALPTSCRPWLPALAWYLRQNLLIFLHSPKYTDSNSRNHFQHPLPPQGGLPDLDIYLYNKPGGQGTGGKGVACITLAFVDEGGAPLSLALWPPSSPGPPDPLREEEFEQLTQVIRCPVVVDSSSAQNGAPRLRLDVWEKGNISIVQLEEKLRGAARQALADAIIELQLLPASLCTEDTPTGSLRNGSLETKSSAGRASTFPPAPVPGEPVTPPSKAGRRSFWDMLSKTECGDLGSPKTTDDIVLDRPEDTRGRRRHKTESVRTPGGAERAPGSDSGAQRQKRRTTQLEEGEVGTLHPVFARVAQRWMEFMVQIGCASVSRSSAHMVSRFLLPSILSEFTALVTSMAGDTSVRIFEQHLGSEPEIFGPCSPGQLGPSPRPAAERHLLLLGRNFLQWRRPTQQAAKAMQRFEPGGDGSSGRNAPRQRLLLLEVVDKKLQLLTYNWAPDLGAALGRALVRLVQWQNARAHLIFCLLSQKLGLFHHYGQLDFPVRDEKEPNPFLLPTMEVETLIRSASPPLSREQGRLSGSSRGGGPLPLDTFPFDEALRDITAARPSSVLGPVPRPPDPVTYHGQQFLEIKMAERRELERQMKMENLFVTWQQRSTPATMPISAGELETLKQSSRLVHYCATAMLFDPAAWLHGPPETSGPPDGQRRHRPESGSGSREAPTSCESLDVSPPGAREEPWLKELSLAFLQQYVQYLQSIGFVLVPLRPPSPARSTSRPRAMAILGTEGRGSFSCPKTKTDGSPKSTSSPVTTYHLQRALPGGIILMELAFQGCYFCVKQFALECSRIPMGQAVNSQLSMLFTEECDKVRDLMHVHSFSYDFHLRLVHQHVLGAHLVLRHGYHLTTFLRHFLAHHPDGPHFGRNHIYQGTLELPTPLIAAHQLYNYVADHASSYHMKPLRMARPGGPEHNEYALVSAWHSSGSYLDSEGLRHQDDFDVSLLVCHCAAPFEEQGEAERHVLRLQFFVVLTSQRELFPRLTADMRRFRKPPRLPPEPEAPGSSAGSPGEASGLILAPGPAPLFPPLAAEVGMARARLAQLVRLAGGHCRRDTLWKRLFLLEPPGPDRLRLGGRLALAELEELLEAVHAKSIGDIDPQLDCFLSMTVSWYQSLIKVLLSRFPQSCRHFQSPDLGTQYLVVLNQKFTDCFVLVFLDSHLGKTSLTVVFREPFPVQPQDSESPPAQLVSTYHHLESVINTACFTLWTRLL

SEQ ID NO: 391 - protein, 1894 aa, Homo sapiens
MKAMPWNWTCLLSHLLMVGMGSSTLLTRQPAPLSQKQRSFVTFRGEPAEGFNHLVVDERTGHIYLGAVNRIYKLSSDLKVLVTHETGPDEDNPKCYPPRIVQTCNEPLTTTNNVNKMLLIDYKENRLIACGSLYQGICKLLRLEDLFKLGEPYHKKEHYLSGVNESGSVFGVIVSYSNLDDKLFIATAVDGKPEYFPTISSRKLTKNSEADGMFAYVFHDEFVASMIKIPSDTFTIIPDFDIYYVYGFSSGNFVYFLTLQPEMVSPPGSTTKEQVYTSKLVRLCKEDTAFNSYVEVPIGCERSGVEYRLLQAAYLSKAGAVLGRTLGVHPDDDLLFTVFSKGQKRKMKSLDESALCIFILKQINDRIKERLQSCYRGEGTLDLAWLKVKDIPCSSALLTIDDNFCGLDMNAPLGVSDMVRGIPVFTEDRDRMTSVIAYVYKNHSLAFVGTKSGKLKKIRVDGPRGNALQYETVQVVDPGPVLRDMAFSKDHEQLYIMSERQLTRVPVESCGQYQSCGECLGSGDPHCGWCVLHNTCTRKERCERSKEPRRFASEMKQCVRLTVHPNNISVSQYNVLLVLETYNVPELSAGVNCTFEDLSEMDGLVVGNQIQCYSPAAKEVPRIITENGDHHVVQLQLKSKETGMTFASTSFVFYNCSVHNSCLSCVESPYRCHWCKYRHVCTHDPKTCSFQEGRVKLPEDCPQLLRVDKILVPVEVIKPITLKAKNLPQPQSGQRGYECILNIQGSEQRVPALRFNSSSVQCQNTSYSYEGMEINNLPVELTVVWNGHFNIDNPAQNKVHLYKCGAMRESCGLCLKADPDFACGWCQGPGQCTLRQHCPAQESQWLELSGAKSKCTNPRITEIIPVTGPREGGTKVTIRGENLGLEFRDIASHVKVAGVECSPLVDGYIPAEQIVCEMGEAKPSQHAGFVEICVAVCRPEFMARSSQLYYFMTLTLSDLKPSRGPMSGGTQVTITGTNLNAGSNVVVMFGKQPCLFHRRSPSYIVCNTTSSDEVLEMKVSVQVDRAKIHQDLVFQYVEDPTIVRIEPEWSIVSGNTPIAVWGTHLDLIQNPQIRAKHGGKEHINICEVLNATEMTCQAPALALGPDHQSDLTERPEEFGFILDNVQSLLILNKTNFTYYPNPVFEAFGPSGILELKPGTPIILKGKNLIPPVAGGNVKLNYTVLVGEKPCTVTVSDVQLLCESPNLIGRHKVMARVGGMEYSPGMVYIAPDSPLSLPAIVSIAVAGGLLIIFIVAVLIAYKRKSRESDLTLKRLQMQMDNLESRVALECKEAFAELQTDIHELTSDLDGAGIPFLDYRTYTMRVLFPGIEDHPVLRDLEVPGYRQERVEKGLKLFAQLINNKVFLLSFIRTLESQRSFSMRDRGNVASLIMTVLQSKLEYATDVLKQLLADLIDKNLESKNHPKLLLRRTESVAEKMLTNWFTFLLYKFLKECAGEPLFSLFCAIKQQMEKGPIDAITGEARYSLSEDKLIRQQIDYKTLVLSCVSPDNANSPEVPVKILNCDTITQVKEKILDAIFKNVPCSHRPKAADMDLEWRQGSGARMILQDEDITTKIENDWKRLNTLAHYQVPDGSVVALVSKQVTAYNAVNNSTVSRTSASKYENMIRYTGSPDSLRSRTPMITPDLESGVKMWHLVKNHEHGDQKEGDRGSKMVSEIYLTRLLATKGTLQKFVDDLFETIFSTAHRGSALPLAIKYMFDFLDEQADKHGIHDPHVRHTWKSNCLPLRFWVNMIKNPQFVFDIHKNSITDACLSVVAQTFMDSCSTSEHRLGKDSPSNKLLYAKDIPSYKNWVERYYSDIGKMPAISDQDMNAYLAEQSRMHMNEFNTMSALSEIFSYVGKYSEEILGPLDHDDQCGKQKLAYKLEQVITLMSLDS

SEQ ID NO: 392 - protein, 2245 aa, Homo sapiens
MPEMTENETPTKKQHRKKNRETHNAVERHRKKKINAGINRIGELIPCSPALKQSKNMILDQAFKYITELKRQNDELLLNGGNNEQAEEIKKLRKQLEEIQKENGRYIELLKANDICLYDDPTIHWKGNLKNSKVSVVIPSDQVQKKIIVYSNGNQPGGNSQGTAVQGITFNVSHNLQKQTANVVPVQRTCNLVTPVSISGVYPSENKPWHQTTVPALATNQPVPLCLPAAISAQSILELPTSESESNVLGATSGSLIAVSIESEPHQHHSLHTCLNDQNSSENKNGQENPKVLKKMTPCVTNIPHSSSATATKVHHGNKSCLSIQDFRGDFQNTFVVSVTTTVCSQPPRTAGDSSPMSISKSADLTSTATVVASSAPGVGKATIPISTLSGNPLDNGWTLSCSLPSSSVSTSDLKNINSLTRISSAGNTQTTWTTLQLAGNTIQPLSQTPSSAVTPVLNESGTSPTTSNHSRYVATDINLNNSFPADGQPVEQVVVTLPSCPSLPMQPLIAQPQVKSQPPKNILPLNSAMQVIQMAQPVGSAVNSAPTNQNVIILQPPSTTPCPTVMRAEVSNQTVGQQIVIIQAANQNPLPLLPAPPPGSVRLPINGANTVIGSNNSVQNVPTPQTFGGKHLVHILPRPSSLSASNSTQTFSVTMSNQQPQTISLNGQLFALQPVMSSSGTTNQTPMQIIQPTTSEDPNTNVALNTFGALASLNQSISQMAGQSCVQLSISQPANSQTAANSQTTTANCVSLTTTAAPPVTTDSSATLASTYNLVSTSSMNTVACLPNMKSKRLNKKPGGRKHLAANKSACPLNSVRDVSKLDCPNTEGSAEPPCNDGLLESFPAVLPSVSVSQANSVSVSASHSLGVLSSESLIPESVSKSKSAEKSSPPSQESVTSEHFAMAAAKSKDSTPNLQQETSQDKPPSSLALSDAAKPCASANVLIPSPSDPHILVSQVPGLSSTTSTTSTDCVSEVEIIAEPCRVEQDSSDTMQTTGLLKGQGLTTLLSDLAKKKNPQKSSLSDQMDHPDFSSENPKIVDSSVNLHPKQELLLMNNDDRDPPQHHSCLPDQEVINGSLINGRQADSPMSTSSGSSRSFSVASMLPETTREDVTSNATTNTCDSCTFVEQTDIVALAARAIFDQENLEKGRVGLQADIREVASKPSEASLLEGDPPFKSQIPKESGTGQAEATPNEFNSQGSIEATMERPLEKPSCSLGIKTSNASLQDSTSQPPSITSLSVNNLIHQSSISHPLASCAGLSPTSEQTTVPATVNLTVSSSSYGSQPPGPSLMTEYSQEQLNTMTSTIPNSQIQEPLLKPSHESRKDSAKRAVQDDLLLSSAKRQKHCQPAPLRLESMSLMSRTPDTISDQTQMMVSQIPPNSSNSVVPVSNPAHGDGLTRLFPPSNNFVTPALRQTEVQCGSQPSVAEQQQTQASQHLQALQQHVPAQGVSHLHSNHLYIKQQQQQQQQQQQQQQQQQAGQLRERHHLYQMQHHVPHAESSVHSQPHNVHQQRTLQQEVQMQKKRNLVQGTQTSQLSLQPKHHGTDQSRSKTGQPHPHHQQMQQQMQQHFGSSQTEKSCENPSTSRNHHNHPQNHLNQDIMHQQQDVGSRQQGSGVSSEHVSGHNPMQRLLTSRGLEQQMVSQPSIVTRSSDMTCTPHRPERNRVSSYSAEALIGKTSSNSEQRMGISIQGSRVSDQLEMRSYLDVPRNKSLAIHNMQGRVDHTVASDIRLSDCQTFKPSGASQQPQSNFEVQSSRNNEIGNPVSSLRSMQSQAFRISQNTGPPPIDRQKRLSYPPVQSIPTGNGIPSRDSENTCHQSFMQSLLAPHLSDQVIGSQRSLSEHQRNTQCGPSSAIEYNCPPTHENVHIRRESESQNRESCDMSLGAINTRNSTLNIPFSSSSSSGDIQGRNTSPNVSVQKSNPMRITESHATKGHMNPPVTTNMHGVARPALPHPSVSHGNGDQGPAVRQANSSVPQRSRHPLQDSSGSKIRQPERNRSGNQRQSTVFDPSLPHLPLSTGGSMILGRQQPATEKRGSIVRFMPDSPQVPNDNSGPDQHTLSQNFGFSFIPEGGMNPPINANASFIPQVTQPSATRTPALIPVDPQNTLPSFYPPYSPAHPTLSNDISIPYFPNQMFSNPSTEKVNSGSLNNRFGSILSPPRPVGFAQPSFPLLPDMPPMHMTNSHLSNFNMTSLFPEIATVLPDGSAMSPLLTIANSSASDSSKQSSNRPAHNISHILGHDCSSAV

SEQ ID NO: 393 - protein, 2290 aa, Homo sapiens
MGRIQEVGWVTAGLVIWAGTCYYIYKFTKGRAQSVRTLARNGSTVKMETVVGVQSQTLAINEAEIKTKPQVEIGAETGARSGPRAEVETKATAIAIHRANSQAKAMVGAEPETQSESKVVAGTLVMTEAVTLTEVKAKAREVAMKEAVTQTDAEAGKIVKKEAVTQTKAKAWALVAKTEAKREAMTQTKAETHILAEKETEINRVMVTQSETLAVPREVAKMGATNKTGIVDETKTRALEETVSVAKTQSEARPGATVDARGNPNGMSREVAGVDMKSCAQSQAVTKIQGDDMPGTGVEDMGNCKTMSRAESGADTRASAQPQIFAKTQTEAIPGAKIDAGGNTNAMCKVGAGADVRACIQPQTVAKKQAEVTSGARVDGRGNTNVISKAITGADMRAAAQPQAVASTHAEAMSDAKVKNRGNPNAMTKAGAKANLRANSQVEALPDARDKSRGNPNVMAKVGDGTDMLSCTQPQLVASVQADTLSDGKIKVRGNVNTMPKEGAGVDMKAQGMAQSQGEALPNTRGKARGKAKAKCKTGPGMDMKTCTQPQAGVKTPAEALLDSRVDGRGNPNATSKAGTKADQRVCGQPLVVANPQGEALPGAKNKVKGNPHTVLKVGAGEGTTDSAQPEAVVSFQGEALLGTKNKVKGNPNVVLKAEVGEGAMGTAQLQIMASSKGEALLDSKNKVKGNSNAVSKAGAGTDTTGSVQPQIVANSQGEVLPGAKNKIRGNPTTVPNSGVGPYTTDSARLQAVANSQGEVLPGAKNKVKANLNAVSKAEAGMGATGSVQPQAVANSHCETLPGAKNKVRGNWNAVSKAGAGMDTRGSAQPQAVANSQGEVLPGAKNKVKGNPNVVSKAGAREDTVGSTQPQVLASSQRETLPGARNKVKGNSNVVSKAGAREDTMGSAQPQVVANSQRETLPGARNKVKGNSNAISKAEAGAGIMGSVQVQVVASFQGEVLPGAKNKVRGNSNAVPKAEAGADTVGSAQPQAVANSQSETLLGARNKVKGNTIAVPKAGTGAGTRHSAQPQIVAGSQGETLPGARDKSMSTSEAEATAEDEAYAKPEAEAMPTSESEGGSGTQACRKTQPNIHDYYWNGIGVEDWIAAERWIKFRFQTMDGDWENSVSWADDENEASIGSWSGASDKAGIIRSWAVACDETSVKSWAGARAENVVGIGTWARAGEQASGGLWAGGQTSEGTWAGDKASGGAWTGAENQASGGSWALAGNQAIGELWAAGQASDGSWPGGQASGVSWVGEEAIGGSWTGAENQASEGSWAGAGAGNMSSVSYWAGVVDQAGGGSWAGTSDQSGGGSKPRFEDQASGEGSWAGAGGQASGGSMLGPEDQSSGRSWADTADQASGGSRLGHVDQSSGGAWAGTLDQSGGGSKPRFENQTTEEGSWAGAGGQAGGGSKVGPEDQSSGRSWANSGDQISGGFLVGIVDQANGGSWTGAGHPASVGPKPIFEDQVSGRGSWADAREQVVGDSRLGLRDQSSGDSWADTGDQASGWFCVCPGSQTNGGSWGGASGQDVGGSRPGPTNQSSAGSWDSPGSQVSGSCWTGAGAVDQAGGCSKPGFEDQAIGGGFWPGAGDQTGGGSRPGSEDQSSGIGSWGVAGGQVLGGARPGPADQSSGGSWAGTGNQSSGRSWIGPGDQAVDCSKPEFEDQACGGGSWAGAGSQASGESWAGSRPGNEAIGGSRMGSEDQATGGSWARSEDQASGRFQVSFEVEANEGFWFGPGAEAVIGSWCWTEEKADIVSRPDDKDEATTASRSGAGEEAMICSRIEAENKASSGSWIRSEEVAYMGSCVGAEAGAGAEAGAGAEAGAGAGAEAGAEAGAGAGAGPGTESGAGIWSWDGDATTVESRLGAGEEAGVESWTLARNVGEDELSRESSPDIEEISLRSLFWAESENSNTFRSKSGKDASFESGAGDNTSIKDKFEAAGGVDIGSWFCAGNENTSEDKSAPKAKAKKSSESRGIYPYMVPGAGMGSWDGAMIWSETKFAHQSEASFPVEDESRKQTRTGEKTRPWSCRCKHEANMDPRDLEKLICMIEMTEDPSVHEIANNALYNSADYSYSHEVVRNVGGISVIESLLNNPYPSVRQKALNALNNISVAAENHRKVKTYLNQVCEDTVTYPLNSNVQLAGLRLIRHLTITSEYQHMVTNYISEFLRLLTVGSGETKDHVLGMLLNFSKNPSMTKDLLIANAPTSLINIFSKKETKENILNALSLFENINYHFKRRAKAFTQDKFSKNSLYFLFQRPKACAKKLRALAAECNDPEVKERVELLISKL

SEQ ID NO: 394 - protein, 1712 aa, Homo sapiens
MGRDQRAVAGPALRRWLLLGTVTVGFLAQSVLAGVKKFDVPCGGRDCSGGCQCYPEKGGRGQPGPVGPQGYNGPPGLQGFPGLQGRKGDKGERGAPGVTGPKGDVGARGVSGFPGADGIPGHPGQGGPRGRPGYDGCNGTQGDSGPQGPPGSEGFTGPPGPQGPKGQKGEPYALPKEERDRYRGEPGEPGLVGFQGPPGRPGHVGQMGPVGAPGRPGPPGPPGPKGQQGNRGLGFYGVKGEKGDVGQPGPNGIPSDTLHPIIAPTGVTFHPDQYKGEKGSEGEPGIRGISLKGEEGIMGFPGLRGYPGLSGEKGSPGQKGSRGLDGYQGPDGPRGPKGEAGDPGPPGLPAYSPHPSLAKGARGDPGFPGAQGEPGSQGEPGDPGLPGPPGLSIGDGDQRRGLPGEMGPKGFIGDPGIPALYGGPPGPDGKRGPPGPPGLPGPPGPDGFLFGLKGAKGRAGFPGLPGSPGARGPKGWKGDAGECRCTEGDEAIKGLPGLPGPKGFAGINGEPGRKGDRGDPGQHGLPGFPGLKGVPGNIGAPGPKGAKGDSRTITTKGERGQPGVPGVPGMKGDDGSPGRDGLDGFPGLPGPPGDGIKGPPGDPGYPGIPGTKGTPGEMGPPGLGLPGLKGQRGFPGDAGLPGPPGFLGPPGPAGTPGQIDCDTDVKRAVGGDRQEAIQPGCIGGPKGLPGLPGPPGPTGAKGLRGIPGFAGADGGPGPRGLPGDAGREGFPGPPGFIGPRGSKGAVGLPGPDGSPGPIGLPGPDGPPGERGLPGEVLGAQPGPRGDAGVPGQPGLKGLPGDRGPPGFRGSQGMPGMPGLKGQPGLPGPSGQPGLYGPPGLHGFPGAPGQEGPLGLPGIPGREGLPGDRGDPGDTGAPGPVGMKGLSGDRGDAGFTGEQGHPGSPGFKGIDGMPGTPGLKGDRGSPGMDGFQGMPGLKGRPGFPGSKGEAGFFGIPGLKGLAGEPGFKGSRGDPGPPGPPPVILPGMKDIKGEKGDEGPMGLKGYLGAKGIQGMPGIPGLSGIPGLPGRPGHIKGVKGDIGVPGIPGLPGFPGVAGPPGITGFPGFIGSRGDKGAPGRAGLYGEIGATGDFGDIGDTINLPGRPGLKGERGTTGIPGLKGFFGEKGTEGDIGFPGITGVTGVQGPPGLKGQTGFPGLTGPPGSQGELGRIGLPGGKGDDGWPGAPGLPGFPGLRGIRGLHGLPGTKGFPGSPGSDIHGDPGFPGPPGERGDPGEANTLPGPVGVPGQKGDQGAPGERGPPGSPGLQGFPGITPPSNISGAPGDKGAPGIFGLKGYRGPPGPPGSAALPGSKGDTGNPGAPGTPGTKGWAGDSGPQGRPGVFGLPGEKGPRGEQGFMGNTGPTGAVGDRGPKGPKGDPGFPGAPGTVGAPGIAGIPQKIAVQPGTVGPQGRRGPPGAPGEMGPQGPPGEPGFRGAPGKAGPQGRGGVSAVPGFRGDEGPIGHQGPIGQEGAPGRPGSPGLPGMPGRSVSIGYLLVKHSQTDQEPMCPVGMNKLWSGYSLLYFEGQEKAHNQDLGLAGSCLARFSTMPFLYCNPGDVCYYASRNDKSYWLSTTAPLPMMPVAEDEIKPYISRCSVCEAPAIAIAVHSQDVSIPHCPAGWRSLWIGYSFLMHTAAGDEGGGQSLVSPGSCLEDFRATPFIECNGGRGTCHYYANKYSFWLTTIPEQSFQGSPSADTLKAGLIRTHISRCQVCMKNL

SEQ ID NO: 395 - protein, 2570 aa, Homo sapiens
MTATTRGSPVGGNDNQGQAPDGQSQPPLQQNQTSSPDSSNENSPATPPDEQGQGDAPPQLEDEEPAFPHTDLAKLDDMINRPRWVVPVLPKGELEVLLEAAIDLSKKGLDVKSEACQRFFRDGLTISFTKILTDEAVSGWKFEIHRCIINNTHRLVELCVAKLSQDWFPLLELLAMALNPHCKFHIYNGTRPCESVSSSVQLPEDELFARSPDPRSPKGWLVDLLNKFGTLNGFQILHDRFINGSALNVQIIAALIKPFGQCYEFLTLHTVKKYFLPIIEMVPQFLENLTDEELKKEAKNEAKNDALSMIIKSLKNLASRVPGQEETVKNLEIFRLKMILRLLQISSFNGKMNALNEVNKVISSVSYYTHRHGNPEEEEWLTAERMAEWIQQNNILSIVLRDSLHQPQYVEKLEKILRFVIKEKALTLQDLDNIWAAQAGKHEAIVKNVHDLLAKLAWDFSPEQLDHLFDCFKASWTNASKKQREKLLELIRRLAEDDKDGVMAHKVLNLLWNLAHSDDVPVDIMDLALSAHIKILDYSCSQDRDTQKIQWIDRFIEELRTNDKWVIPALKQIREICSLFGEAPQNLSQTQRSPHVFYRHDLINQLQHNHALVTLVAENLATYMESMRLYARDHEDYDPQTVRLGSRYSHVQEVQERLNFLRFLLKDGQLWLCAPQAKQIWKCLAENAVYLCDREACFKWYSKLMGDEPDLDPDINKDFFESNVLQLDPSLLTENGMKCFERFFKAVNCREGKLVAKRRAYMMDDLELIGLDYLWRVVIQSNDDIASRAIDLLKEIYTNLGPRLQVNQVVIHEDFIQSCFDRLKASYDTLCVLDGDKDSVNCARQEAVRMVRVLTVLREYINECDSDYHEERTILPMSRAFRGKHLSFVVRFPNQGRQVDDLEVWSHTNDTIGSVRRCILNRIKANVAHTKIELFVGGELIDPADDRKLIGQLNLKDKSLITAKLTQISSNMPSSPDSSSDSSTGSPGNHGNHYSDGPNPEVESCLPGVIMSLHPRYISFLWQVADLGSSLNMPPLRDGARVLMKLMPPDSTTIEKLRAICLDHAKLGESSLSPSLDSLFFGPSASQVLYLTEVVYALLMPAGAPLADDSSDFQFHFLKSGGLPLVLSMLTRNNFLPNADMETRRGAYLNALKIAKLLLTAIGYGHVRAVAEACQPGVEGVNPMTQINQVTHDQAVVLQSALQSIPNPSSECMLRNVSVRLAQQISDEASRYMPDICVIRAIQKIIWASGCGSLQLVFSPNEEITKIYEKTNAGNEPDLEDEQVCCEALEVMTLCFALIPTALDALSKEKAWQTFIIDLLLHCHSKTVRQVAQEQFFLMCTRCCMGHRPLLFFITLLFTVLGSTARERAKHSGDYFTLLRHLLNYAYNSNINVPNAEVLLNNEIDWLKRIRDDVKRTGETGIEETILEGHLGVTKELLAFQTSEKKFHIGCEKGGANLIKELIDDFIFPASNVYLQYMRNGELPAEQAIPVCGSPPTINAGFELLVALAVGCVRNLKQIVDSLTEMYYIGTAITTCEALTEWEYLPPVGPRPPKGFVGLKNAGATCYMNSVIQQLYMIPSIRNGILAIEGTGSDVDDDMSGDEKQDNESNVDPRDDVFGYPQQFEDKPALSKTEDRKEYNIGVLRHLQVIFGHLAASRLQYYVPRGFWKQFRLWGEPVNLREQHDALEFFNSLVDSLDEALKALGHPAMLSKVLGGSFADQKICQGCPHRYECEESFTTLNVDIRNHQNLLDSLEQYVKGDLLEGANAYHCEKCNKKVDTVKRLLIKKLPPVLAIQLKRFDYDWERECAIKFNDYFEFPRELDMEPYTVAGVAKLEGDNVNPESQLIQQSEQSESETAGSTKYRLVGVLVHSGQASGGHYYSYIIQRNGGDGERNRWYKFDDGDVTECKMDDDEEMKNQCFGGEYMGEVFDHMMKRMSYRRQKRWWNAYILFYERMDTIDQDDELIRYISELAITTRPHQIIMPSAIERSVRKQNVQFMHNRMQYSMEYFQFMKKLLTCNGVYLNPPPGQDHLLPEAEEITMISIQLAARFLFTTGFHTKKVVRGSASDWYDALCILLRHSKNVRFWFAHNVLFNVSNRFSEYLLECPSAEVRGAFAKLIVFIAHFSLQDGPCPSPFASPGPSSQAYDNLSLSDHLLRAVLNLLRREVSEHGRHLQQYFNLFVMYANLGVAEKTQLLKLSVPATFMLVSLDEGPGPPIKYQYAELGKLYSVVSQLIRCCNVSSRMQSSINGNPPLPNPFGDPNLSQPIMPIQQNVADILFVRTSYVKKIIEDCSNSEETVKLLRFCCWENPQFSSTVLSELLWQVAYSYTYELRPYLDLLLQILLIEDSWQTHRIHNALKGIPDDRDGLFDTIQRSKNHYQKRAYQCIKCMVALFSNCPVAYQILQGNGDLKRKWTWAVEWLGDELERRPYTGNPQYTYNNWSPPVQSNETSNGYFLERSHSARMTLAKACELCPEEVKKATSVQQIEMEESKEPDDQDAPDEHESPPPEDAPLYPHSPGSQYQQNNHVHGQPYTGPAAHHMNNPQRTGQRAQENYEGSEEVSPPQTKDQ

SEQ ID NO: 396 - protein, 2916 aa, Homo sapiens
MRLDEITKSENEDGEKKMFTQQFESTDACVYEVYVKINSIVKSQSQCGLKRGSPETELWGAIVFRSQEENAKPVKETEVTASDADSGLYGFIEYSLYDGFLSYEAPQAFRIDPHDGQICVSQDIDRERDPATYDLLVEAKDGDEQRMTHLALVKGGLSAQAFVRVDLEDVNDNHPVFNPSTYVTSISDETQPGTEIINVLATDQDSGIYGTVAYELIPGNVSSLFTIDSTTGLYSPEVEILSAVNFSADKEVMNSLEMFLPLLRHFKKVERDEEAAEKKFEASRGWFMRFKGRRHLHYLKVQDEAASADGEAAARYVANLAKILGEGIIYLTLPLSHLESTTLSLMVSAQDGGGLTAVINADVTIHIFQTTLAPAEFERPKYTFLVYEDVPEDSPIGTVKAREPLNSSEPIFYRISSGDLGGKFSIHPRLGTIRTRKPLDHETQPVVVLTVQAQLGSAPACSSTEVNITVMDVNDNHPAFLRTSDEIRISQTTPPGTALYLARAEDRDSGRNGLIRYSIASPQPGVFAIDRALGVLFLNGSLGAGEQRELTLTLRAEDQGVHPQAALLVLTVVIEKREHSPSWTFEHLVYQVEVSESLSPMTQMLQTQAHPLGPQRAASPLRYSLEPSVDSAMFGIRPYTGWIYLRRQFDYESTQTYNFRVFAWIPEDGFLQNVSTTVIVRVWDENDNSPTFLHDVLFLKVEESPVPQGVIGKITAIDMDSGKNGQLLYFLLSDGKFFKMNPNTGPAGTIYVITWADGAAAFSGTDFAFSSDELQAFVLKSLFCELGEGELINWVALDREHRGHHEMTVLVTDRGSPPRNATMAVYVSVTDINDNRPFFPQCLPGKELHVKVLEGQPVNMLVTTVFAKDPDEGNNAEVTYSVSSEDSSDHFKIDANNGEIRTTTILSYDYRPSYRMSVIATDQGVPPLQGQAVVNIQVIPLSKGRAIMSQNIRHLIIPENLKPTKIMSLIKSSDHLQQHYNGKLHFSIVADDKDGHFEIDSSTGDLFLSKELDYETTSHYLFRVITTDHSKNLSLSSTVFLSIDVEDQNDHSPSFQDELIVISVEENVPIGTLVYVFNAKDDDGSFLNSRIQYYIESHNPGTNPFLIHPSFGTLVTVSRLDRESIPTVILTVTASDQAVNVTDRRLRSLTAQIVILDVNDHNPTFISFPNAHVKEDVTVGSLVHHITAHDPDEGRNGKVTYSILSGNENMTFMLDESSGLLTTTCPLDYEMKTQHILTVLALDDGTPALSSSQTLTVTVLDVNDEAPVFKQHLYEASVKENQNPGEFVTRVEALDRDSGVNSKLQFEIMPGASFELFEINSDTGEVVTTTILDREIQEVFTLRVLVRDGGFPSLSSTTTILCTVEDENDHAPEFIVSSYDIEVLENQEPEVVYTVLASDMDAGNNRAVEYHIIDGNTDECFTINEMSGELSTTRALDREQISNFTLVILCSDLGDPPRSSVIHLQVRVLDANDHSPSFPTLYYQSSVREDAEVGTVVLVLSAVDKDEGLNGQTEYFLTDEASGAFTIDPMSGTLKTSNTLDREARSQHTFSAVARDCSIQGSRSTTVIIKVYVTDVNDNDPVLEQNPFDVFLSPESPTNQTTVIVRADDLDLGPNGTVVFSFAETQSMFSIDKYTGEIQFQQNPSSEYFPIWLQLKVTDQGIPARTTTGLLVIHMEGEDVKISFSHHLYKGLVTENCEAGTSIVTVKAFAPDSIQDSMKYSIFSGNEDGVLSLCSKSGQLTVKEPKFLDFEVRNEVQLIVLAESSGHRAYCKVAVLIQDENDNSPCFEQSIYQASVSESQLYNAHVIQVFATDLDSGLNGLIEYSILSGNQEEAFQIDALSGVITTKAILDYELTSSYSLIVQATDKGMPRLSNTTVIKVQVTDINDNAPAFLPSEAVEITEDSLPGVIVTHVSVHDVDLNSAFIFSFAKESNPGTKFAIDQNTGVVVLVKTLDFEEMTEYELLIQISDSVHYTEGALVVRVLDVNDNPPVFSQDFYQVTVPESIPVGYSVLTLSATDLESNENISYRILSSSKEFSIDPKNGTIFTISPVLLLDTISTTQFLVEASDGGNPDLRALTLVEIGIEDMNNYAPEFTVKSYNLSLSEDALVGSTLVTFSNIDHDWTRENTYVEYSIISGNSQNNFHVETKFFHSEYPYKQVGYLVLLHSLDREASASHELVILASDSGCPPLSSTAVISIQVLDVNDNPPNFSSLSYHTHVKESTPLGSHITVVSANDRDTGSHAEIIYNIISGNEKGHFYLEENTGVLYLIKPLDYEKMTKFTLTVQASDAEKKHFSFAVVFVSVLDDNDHAPQFMFSSFSCIVPENLPISSTICSINALDFDAGPYGELTYSIVSPCFLTHGMSYDHDLFLIDPLTGDIHAKQILDYENGNKYCLTVQAKDKGDATASLVVWVDIEGIDEFEPIFTQDQYFFTLPEKNKDRQLIGRVEASDADAGIDGVILYSLGTSSPFFSVNKTNGNIYLIRALPLIKSQLNKEDTLEMKIIAHSPKSDSKFASCTVFVNVSFSSEGTPLAVFASSFSISLVVSFLVFLILICILIVMILRHKQKDTINNYEEKKTSSLDADLRVTRDASVLKAFQKTDDCSNEVVPVDATPEWLSLISIMEKDIVNLYRHSNSSGHCSVEGETAEDKEIQRINEHPYRKCSDSALSDHESRVPDSGIPRDSDQLSCLSGETDVMVTAETAEASQTFGEGDQGEGCSTTCAQNNVLPQTVQKREAKESILADVRKESVFISGDQEVRCAALSTQTTSDHDGKDNYHWNYLLSWEPKFQPLASVFNDIAKLKDEHLHMPGIPKEKKSFVFPPPLITAVAQPGIKAVPPRMPAVNLGQVPPKHPRSPIPYHLGSLPEGMTPNFSPSLSLLTMQPPALSPLLREGELLGTHISGTCHELKAEDEVQI

SEQ ID NO: 397 - protein, 1907 aa, Homo sapiens
MEVAWLVYVLGQQPLARQGEGQSRLVPGRGLVLWLPGLPRSSPSWPAVDLAPLAPARPRGPLICHTGHEQAGREPGPGSSTKGPVLHDQDTRCAFLPRPPGPLQTRRYCRHQGRQGSGLGAGPGAGTWAPAPPGVSKPRCPGRARPGEGQQQVTTARPPAINRGARQPRAGAAAAGRGPGAGAWRTGEAAASAGPAVGEGGAMGSRRAPSRGWGAGGRSGAGGDGEDDGPVWIPSPASRSYLLSVRPETSLSSNRLSHPSSGRSTFCSIIAQLTEETQPLFETTLKSRSVSEDSDVRFTCIVTGYPEPEVTWYKDDTELDRYCGLPKYEITHQGNRHTLQLYRCREEDAAIYQASAQNSKGIVSCSGVLEVGTMTEYKIHQRWFAKLKRKAAAKLREIEQSWKHEKAVPGEVDTLRKLSPDRFQRKRRLSGAQAPGPSVPTREPEGGTLAAWQEGETETAQHSGLGLINSFASGEVTTNGEAAPENGEDGEHGLLTYICDAMELGPQRALKEESGAKKKKKDEESKQGLRKPELEKAAQSRRSSENCIPSSDEPDSCGTQGPVGVEQVQTQPRGRAARGPGSSGTDSTRKPASAVGTPDKAQKAPGPGPGQEVYFSLKDMYLENTQAVRPLGEEGPQTLSVRAPGESPKGKAPLRARSEGVPGAPGQPTHSLTPQPTRPFNRKRFAPPKPKGEATTDSKPISSLSQAPECGAQSLGKAPPQASVQVPTPPARRRHGTRDSTLQGQAGHRTPGEVLECQTTTAPTMSASSSSDVASIGVSTSGSQGIIEPMDMETQEDGRTSANQRTGSKKNVQADGKIQVDGRTRGDGTQTAQRTRADRKTQVDAGTQESKRPQSDRSAQKGMMTQGRAETQLETTQAGEKIQEDRKAQADKGTQEDRRMQGEKGMQGEKGTQSEGSAPTAMEGQSEQEVATSLGPPSRTPKLPPTAGPRAPLNIECFVQTPEGSCFPKKPGCLPRSEEAVVTASRNHEQTVLGPLSGNLMLPAQPPHEGSVEQVGGERCRGPQSSGPVEAKQEDSPFQCPKEERPGGVPCMDQGGCPLAGLSQEVPTMPSLPGTGLTASPKAGPCSTPTSQHGSTATFLPSEDQVLMSSAPTLHLGLGTPTQSHPPETMATSSEGACAQVPDVEGRTPGPRSCDPGLIDSLKNYLLLLLKLSSTETSGAGGESQVGAATGGLVPSATLTPTVEVAGLSPRTSRRILERVENNHLVQSAQTLLLSPCTSRRLTGLLDREVQAGRQALAAARGSWGPGPSSLTVPAIVVDEEDPGLASEGASEGEGEVSPEGPGLLGASQESSMAGRLGEAGGQAAPGQGPSAESIAQEPSQEEKFPGEALTGLPAATPEELALGARRKRFLPKVRAAGDGEATTPEERESPTVSPRGPRKSLVPGSPGTPGRERRSPTQGRKASMLEVPRAEEELAAGDLGPSPKAGGLDTEVALDEGKQETLAKPRKAKDLLKAPQVIRKIRVEQFPDASGSLKLWCQFFNILSDSVLTWAKDQRPVGEVGRSAGDEGPAALAIVQASPVDCGVYRCTIHNEHGSASTDFCLSPEVLSGFISREEGEVGEEIEMTPMVFAKGLADSGCWGDKLFGRLVSEELRGGGYGCGLRKASQAKVIYGLEPIFESGRTCIIKVSSLLVFGPSSETSLVGRNYDVTIQGCKIQNMSREYCKIFAAEARAAPGFGEVPEIIPLYLIYRPANNIPYATLEEDLGKPLESYCSREWGCAEAPTASGSSEAMQKCQTFQHWLYQWTNGSFLVTDLAGVDWKMTDVQIATKLRGYQGLKESCFPALLDRFASSHQCNAYCELLGLTPLKGPEAAHPQAKAKGSKSPSAGRKGSQLSPQPQKKGLPSPQGTRKSAPSSKATPQASEPVTTQLLGQPPTQEEGSKAQGMR

SEQ ID NO: 398 - protein, 2325 aa, Homo sapiens
MKKGSQQKIFSKAKIPSSSHSPIPSSMSNMRSRSLSPLIGSETLPFHSGGQWCEQVEIADENNMLLDYQDHKGADSHAGVRYITEALIKKLTKQDNLALIKSLNLSLSKDGGKKFKYIENLEKCVKLEVLNLSYNLIGKIEKLDKLLKLRELNLSYNKISKIEGIENMCNLQKLNLAGNEIEHIPVWLGKKLKSLRVLNLKGNKISSLQDISKLKPLQDLISLILVENPVVTLPHYLQFTIFHLRSLESLEGQPVTTQDRQEAFERFSLEEVERLERDLEKKMIETEELKSKQTRFLEEIKNQDKLNKSLKEEAMLQKQSCEELKSDLNTKNELLKQKTIELTRACQKQYELEQELAFYKIDAKFEPLNYYPSEYAEIDKAPDESPYIGKSRYKRNMFATESYIIDSAQAVQIKKMEPDEQLRNDHMNLRGHTPLDTQLEDKEKKISAAQTRLSELHDEIEKAEQQILRATEEFKQLEEAIQLKKISEAGKDLLYKQLSGRLQLVNKLRQEALDLELQMEKQKQEIAGKQKEIKDLQIAIDSLDSKDPKHSHMKAQKSGKEQQLDIMNKQYQQLESRLDEILSRIAKETEEIKDLEEQLTEGQIAANEALKKDLEGVISGLQEYLGTIKGQATQAQNECRKLRDEKETLLQRLTEVEQERDQLEIVAMDAENMRKELAELESALQEQHEVNASLQQTQGDLSAYEAELEARLNLRDAEANQLKEELEKVTRLTQLEQSALQAELEKERQALKNALGKAQFSEEKEQENSELHAKLKHLQDDNNLLKQQLKDFQNHLNHVVDGLVRPEEVAARVDELRRKLKLGTGEMNIHSPSDVLGKSLADLQKQFSEILARSKWERDEAQVRERKLQEEMALQQEKLATGQEEFRQACERALEARMNFDKRQHEARIQQMENEIHYLQENLKSMEEIQGLTDLQLQEADEEKERILAQLRELEKKKKLEDAKSQEQVFGLDKELKKLKKAVATSDKLATAELTIAKDQLKSLHGTVMKINQERAEELQEAERFSRKAAQAARDLTRAEAEIELLQNLLRQKGEQFRLEMEKTGVGTGANSQVLEIEKLNETMERQRTEIARLQNVLDLTGSDNKGGFENVLEEIAELRREVSYQNDYISSMADPFKRRGYWYFMPPPPSSKVSSHSSQATKDSGVGLKYSASTPVRKPRPGQQDGKEGSQPPPASGYWVYSPIRSGLHKLFPSRDADSGGDSQEESELDDQEEPPFVPPPGYMMYTVLPDGSPVPQGMALYAPPPPLPNNSRPLTPGTVVYGPPPAGAPMVYGPPPPNFSIPFIPMGVLHCNVPEHHNLENEVSRLEDIMQHLKSKKREERWMRASKRQSEKEMEELHHNIDDLLQEKKSLECEVEELHRTVQKRQQQKDFIDGNVESLMTELEIEKSLKHHEDIVDEIECIEKTLLKRRSELREADRLLAEAESELSCTKEKTKNAVEKFTDAKRSLLQTESDAEELERRAQETAVNLVKADQQLRSLQADAKDLEQHKIKQEEILKEINKIVAAKDSDFQCLSKKKEKLTEELQKLQKDIEMAERNEDHHLQVLKESEVLLQAKRAELEKLKSQVTSQQQEMAVLDRQLGHKKEELHLLQGSMVQAKADLQEALRLGETEVTEKCNHIREVKSLLEELSFQKGELNVQISERKTQLTLIKQEIEKEEENLQVVLRQMSKHKTELKNILDMLQLENHELQGLKLQHDQRVSELEKTQVAVLEEKLELENLQQISQQQKGEIEWQKQLLERDKREIERMTAESRALQSCVECLSKEKEDLQEKCDIWEKKLAQTKRVLAAAEENSKMEQSNLEKLELNVRKLQQELDQLNRDKLSLHNDISAMQQQLQEKREAVNSLQEELANVQDHLNLAKQDLLHTTKHQDVLLSEQTRLQKDISEWANRFEDCQKEEETKQQQLQVLQNEIEENKLKLVQQEMMFQRLQKERESEESKLETSKVTLKEQQHQLEKELTDQKSKLDQVLSKVLAAEERVRTLQEEERWCESLEKTLSQTKRQLSEREQQLVEKSGELLALQKEADSMRADFSLLRNQFLTERKKAEKQVASLKEALKIQRSQLEKNLLEQKQENSCIQKEMATIELVAQDNHERARRLMKELNQMQYEYTELKKQMANQKDLERRQMEISDAMRTLKSEVKDEIRTSLKNLNQFLPELPADLEAILERNENLEGELESLKENLPFTMNEGPFEEKLNFSQVHIMDEHWRGEALREKLRHREDRLKAQLRHCMSKQAEVLIKGKRQTEGTLHSLRRQVDALGELVTSTSADSASSPSLSQLESSLTEDSQLGQNQEKNASAR

SEQ ID NO: 399 - protein, 1877 aa, Homo sapiens
MLGSSVKSVQPEVELSSGGGDEGADEPRGAGRKAAAADGRGMLPKRAKAPGGGGGMAKASAAELKVFKSGSVDSRVPGGPPASNLRKQKSLTNLSFLTDSEKKLQLYEPEWSDDMAKAPKGLGKVGSKGREAPLMSKTLSKSEHSLFQAKGSPAGGAKTPLAPLAPNLGKPSRIPRGPYAEVKPLSKAPEAAVSEDGKSDDELLSSKAKAQKSSGPVPSAKGQEERAFLKVDPELVVTVLGDLEQLLFSQMLDPESQRKRTVQNVLDLRQNLEETMSSLRGSQVTHSSLEMTCYDSDDANPRSVSSLSNRSSPLSWRYGQSSPRLQAGDAPSVGGSCRSEGTPAWYMHGERAHYSHTMPMRSPSKLSHISRLELVESLDSDEVDLKSGYMSDSDLMGKTMTEDDDITTGWDESSSISSGLSDASDNLSSEEFNASSSLNSLPSTPTASRRNSTIVLRTDSEKRSLAESGLSWFSESEEKAPKKLEYDSGSLKMEPGTSKWRRERPESCDDSSKGGELKKPISLGHPGSLKKGKTPPVAVTSPITHTAQSALKVAGKPEGKATDKGKLAVKNTGLQRSSSDAGRDRLSDAKKPPSGIARPSTSGSFGYKKPPPATGTATVMQTGGSATLSKIQKSSGIPVKPVNGRKTSLDVSNSAEPGFLAPGARSNIQYRSLPRPAKSSSMSVTGGRGGPRPVSSSIDPSLLSTKQGGLTPSRLKEPTKVASGRTTPAPVNQTDREKEKAKAKAVALDSDNISLKSIGSPESTPKNQASHPTATKLAELPPTPLRATAKSFVKPPSLANLDKVNSNSLDLPSSSDTTHASKVPDLHATSSASGGPLPSCFTPSPAPILNINSASFSQGLELMSGFSVPKETRMYPKLSGLHRSMESLQMPMSLPSAFPSSTPVPTPPAPPAAPTEEETEELTWSGSPRAGQLDSNQRDRNTLPKKGLRYQLQSQEETKERRHSHTIGGLPESDDQSELPSPPALPMSLSAKGQLTNIVSPTAATTPRITRSNSIPTHEAAFELYSGSQMGSTLSLAERPKGMIRSGSFRDPTDDVHGSVLSLASSASSTYSSAEERMQSEQIRKLRRELESSQEKVATLTSQLSANANLVAAFEQSLVNMTSRLRHLAETAEEKDTELLDLRETIDFLKKKNSEAQAVIQGALNASETTPKELRIKRQNSSDSISSLNSITSHSSIGSSKDADAKKKKKKSWVYELRSSFNKAFSIKKGPKSASSYSDIEEIATPDSSAPSSPKLQHGSTETASPSIKSSTSSSVGTDVTEGPAHPAPHTRLFHANEEEEPEKKEVSELRSELWEKEMKLTDIRLEALNSAHQLDQLRETMHNMQLEVDLLKAENDRLKVAPGPSSGSTPGQVPGSSALSSPRRSLGLALTHSFGPSLADTDLSPMDGISTCGPKEEVTLRVVVRMPPQHIIKGDLKQQEFFLGCSKVSGKVDWKMLDEAVFQVFKDYISKMDPASTLGLSTESIHGYSISHVKRVLDAEPPEMPPCRRGVNNISVSLKGLKEKCVDSLVFETLIPKPMMQHYISLLLKHRRLVLSGPSGTGKTYLTNRLAEYLVERSGREVTEGIVSTFNMHQQSCKDLQLYLSNLANQIDRETGIGDVPLVILLDDLSEAGSISELVNGALTCKYHKCPYIIGTTNQPVKMTPNHGLHLSFRMLTFSNNVEPANGFLVRYLRRKLVESDSDINANKEELLRVLDWVPKLWYHLHTFLEKHSTSDFLIGPCFFLSCPIGIEDFRTWFIDLWNNSIIPYLQEGAKDGIKVHGQKAAWEDPVEWVRDTLPWPSAQQDQSKLYHLPPPTVGPHSIASPPEDRTVKDSTPSSLDSDPLMAMLLKLQEAANYIESPDRETILDPNLQATL

SEQ ID NO: 400 - protein, 1693 aa, Homo sapiens
MADLEVYKNLSPEKVERCMSVMQSGTQMIKLKRGTKGLVRLFYLDEHRTRLRWRPSRKSEKAKILIDSIYKVTEGRQSEIFHRQAEGNFDPSCCFTIYHGNHMESLDLITSNPEEARTWITGLKYLMAGISDEDSLAKRQRTHDQWVKQTFEEADKNGDGLLNIEEIHQLMHKLNVNLPRRKVRQMFQEADTDENQGTLTFEEFCVFYKMMSLRRDLYLLLLSYSDKKDHLTVEELAQFLKVEQKMNNVTTDYCLDIIKKFEVSEENKVKNVLGIEGFTNFMRSPACDIFNPLHHEVYQDMDQPLCNYYIASSHNTYLTGDQLLSQSKVDMYARVLQEGCRCVEVDCWDGPDGEPVVHHGYTLTSKILFRDVVETINKHAFVKNEFPVILSIENHCSIQQQRKIAQYLKGIFGDKLDLSSVDTGECKQLPSPQSLKGKILVKGKKLPYHLGDDAEEGEVSDEDSADEIEDECKFKLHYSNGTTEHQVESFIRKKLESLLKESQIRDKEDPDSFTVRALLKATHEGLNAHLKQSPDVKESGKKSHGRSLMTNFGKHKKTTKSRSKSYSTDDEEDTQQSTGKEGGQLYRLGRRRKTMKLCRELSDLVVYTNSVAAQDIVDDGTTGNVLSFSETRAHQVVQQKSEQFMIYNQKQLTRIYPSAYRIDSSNFNPLPYWNAGCQLVALNYQSEGRMMQLNRAKFKANGNCGYVLKPQQMCKGTFNPFSGDPLPANPKKQLILKVISGQQLPKPPDSMFGDRGEIIDPFVEVEIIGLPVDCCKDQTRVVDDNGFNPVWEETLTFTVHMPEIALVRFLVWDHDPIGRDFVGQRTVTFSSLVPGYRHVYLEGLTEASIFVHITINEIYGKWSPLILNPSYTILHFLGATKNRQLQGLKGLFNKNPRHSSSENNSHYVRKRSIGDRILRRTASAPAKGRKKSKMGFQEMVEIKDSVSEATRDQDGVLRRTTRSLQARPVSMPVDRNLLGALSLPVSETAKDIEGKENSLAEDKDGRRKGKASIKDPHFLNFNKKLSSSSSALLHKDTSQGDTIVSTAHMSVTGEQLGMSSPRGGRTTSNATSNCQENPCPSKSLSPKQHLAPDPVVNPTQDLHGVKIKEKGNPEDFVEGKSILSGSVLSHSNLEIKNLEGNRGKGRAATSFSLSDVSMLCSDIPDLHSTAILQESVISHLIDNVTLTNENEPGSSISALIGQFDETNNQALTVVSHLHNTSVMSGHCPLPSLGLKMPIKHGFCKGKSKSSFLCSSPELIALSSSETTKHATNTVYETTCTPISKTKPDDDLSSKAKTAALESNLPGSPNTSRGWLPKSPTKGEDWETLKSCSPASSPDLTLEDVIADPTLCFNSGESSLVEIDGESENLSLTTCEYRREGTSQLASPLKLKYNQGVVEHFQRGLRNGYCKETLRPSVPEIFNNIQDVKTQSISYLAYQGAGFVHNHFSDSDAKMFQTCVPQQSSAQDMHVPVPKQLAHLPLPALKLPSPCKSKSLGDLTSEDIACNFESKYQCISKSFVTTGIRDKKGVTVKTKSLEPIDALTEQLRKLVSFDQEDNCQVLYSKQDANQLPRALVRKLSSRSQSRVRNIASRAKEKQEANKQKVPNPSNGAGVVLRNKPSAPTPAVNRHSTGSYIAGYLKNTKGGGLEGRGIPEGACTALHYGHVDQFCSDNSVLQTEPSSDDKPEIYFLLRL

SEQ ID NO: 401 - protein, 2458 aa, Homo sapiens
MVLLLCLSCLIFSCLTFSWLKIWGKMTDSKPITKSKSEANLIPSQEPFPASDNSGETPQRNGEGHTLPKTPSQAEPASHKGPKDAGRRRNSLPPSHQKPPRNPLSSSDAAPSPELQANGTGTQGLEATDTNGLSSSARPQGQQAGSPSKEDKKQANIKRQLMTNFILGSFDDYSSDEDSVAGSSRESTRKGSRASLGALSLEAYLTTGEAETRVPTMRPSMSGLHLVKRGREHKKLDLHRDFTVASPAEFVTRFGGDRVIEKVLIANNGIAAVKCMRSIRRWAYEMFRNERAIRFVVMVTPEDLKANAEYIKMADHYVPVPGGPNNNNYANVELIVDIAKRIPVQAVWAGWGHASENPKLPELLCKNGVAFLGPPSEAMWALGDKIASTVVAQTLQVPTLPWSGSGLTVEWTEDDLQQGKRISVPEDVYDKGCVKDVDEGLEAAERIGFPLMIKASEGGGGKGIRKAESAEDFPILFRQVQSEIPGSPIFLMKLAQHARHLEVQILADQYGNAVSLFGRDCSIQRRHQKIVEEAPATIAPLAIFEFMEQCAIRLAKTVGYVSAGTVEYLYSQDGSFHFLELNPRLQVEHPCTEMIADVNLPAAQLQIAMGVPLHRLKDIRLLYGESPWGVTPISFETPSNPPLARGHVIAARITSENPDEGFKPSSGTVQELNFRSSKNVWGYFSVAATGGLHEFADSQFGHCFSWGENREEAISNMVVALKELSIRGDFRTTVEYLINLLETESFQNNDIDTGWLDYLIAEKVQAEKPDIMLGVVCGALNVADAMFRTCMTDFLHSLERGQVLPADSLLNLVDVELIYGGVKYILKVARQSLTMFVLIMNGCHIEIDAHRLNDGGLLLSYNGNSYTTYMKEEVDSYRITIGNKTCVFEKENDPTVLRSPSAGKLTQYTVEDGGHVEAGSSYAEMEVMKMIMTLNVQERGRVKYIKRPGAVLEAGCVVARLELDDPSKVHPAEPFTGELPAQQTLPILGEKLHQVFHSVLENLTNVMSGFCLPEPVFSIKLKEWVQKLMMTLRHPSLPLLELQEIMTSVAGRIPAPVEKSVRRVMAQYASNITSVLCQFPSQQIATILDCHAATLQRKADREVFFINTQSIVQLVQRYRSGIRGYMKTVVLDLLRRYLRVEHHFQQAHYDKCVINLREQFKPDMSQVLDCIFSHAQVAKKNQLVIMLIDELCGPDPSLSDELISILNELTQLSKSEHCKVALRARQILIASHLPSYELRHNQVESIFLSAIDMYGHQFCPENLKKLILSETTIFDVLPTFFYHANKVVCMASLEVYVRRGYIAYELNSLQHRQLPDGTCVVEFQFMLPSSHPNRMTVPISITNPDLLRHSTELFMDSGFSPLCQRMGAMVAFRRFEDFTRNFDEVISCFANVPKDTPLFSEARTSLYSEDDCKSLREEPIHILNVSIQCADHLEDEALVPILRTFVQSKKNILVDYGLRRITFLIAQEKEFPKFFTFRARDEFAEDRIYRHLEPALAFQLELNRMRNFDLTAVPCANHKMHLYLGAAKVKEGVEVTDHRFFIRAIIRHSDLITKEASFEYLQNEGERLLLEAMDELEVAFNNTSVRTDCNHIFLNFVPTVIMDPFKIEESVRYMVMRYGSRLWKLRVLQAEVKINIRQTTTGSAVPIRLFITNESGYYLDISLYKEVTDSRSGNIMFHSFGNKQGPQHGMLINTPYVTKDLLQAKRFQAQTLGTTYIYDFPEMFRQALFKLWGSPDKYPKDILTYTELVLDSQGQLVEMNRLPGGNEVGMVAFKMRFKTQEYPEGRDVIVIGNDITFRIGSFGPGEDLLYLRASEMARAEGIPKIYVAANSGARIGMAEEIKHMFHVAWVDPEDPHKGFKYLYLTPQDYTRISSLNSVHCKHIEEGGESRYMITDIIGKDDGLGVENLRGSGMIAGESSLAYEEIVTISLVTCRAIGIGAYLVRLGQRVIQVENSHIILTGASALNKVLGREVYTSNNQLGGVQIMHYNGVSHITVPDDFEGVYTILEWLSYMPKDNHSPVPIITPTDPIDREIEFLPSRAPYDPRWMLAGRPHPTLKGTWQSGFFDHGSFKEIMAPWAQTVVTGRARLGGIPVGVIAVETRTVEVAVPADPANLDSEAKIIQQAGQVWFPDSAYKTAQAVKDFNREKLPLMIFANWRGFSGGMKDMYDQVLKFGAYIVDGLRQYKQPILIYIPPYAELRGGSWVVIDATINPLCIEMYADKESRGGVLEPEGTVEIKFRKKDLIKSMRRIDPAYKKLMEQLGEPDLSDKDRKDLEGRLKAREDLLLPIYHQVAVQFADFHDTPGRMLEKGVISDILEWKTARTFLYWRLRRLLLEDQVKQEILQASGELSHVHIQSMLRRWFVETEGAVKAYLWDNNQVVVQWLEQHWQAGDGPRSTIRENITYLKHDSVLKTIRGLVEENPEVAVDCVIYLSQHISPAERAQVVHLLSTMDSPAST

SEQ ID NO: 402 - protein, 1939 aa, Homo sapiens
MTDAQMADFGAAAQYLRKSEKERLEAQTRPFDIRTECFVPDDKEEFVKAKILSREGGKVIAETENGKTVTVKEDQVLQQNPPKFDKIEDMAMLTFLHEPAVLFNLKERYAAWMIYTYSGLFCVTVNPYKWLPVYNAEVVAAYRGKKRSEAPPHIFSISDNAYQYMLTDRENQSILITGESGAGKTVNTKRVIQYFASIAAIGDRGKKDNANANKGTLEDQIIQANPALEAFGNAKTVRNDNSSRFGKFIRIHFGATGKLASADIETYLLEKSRVIFQLKAERNYHIFYQILSNKKPELLDMLLVTNNPYDYAFVSQGEVSVASIDDSEELMATDSAFDVLGFTSEEKAGVYKLTGAIMHYGNMKFKQKQREEQAEPDGTEDADKSAYLMGLNSADLLKGLCHPRVKVGNEYVTKGQSVQQVYYSIGALAKAVYEKMFNWMVTRINATLETKQPRQYFIGVLDIAGFEIFDFNSFEQLCINFTNEKLQQFFNHHMFVLEQEEYKKEGIEWTFIDFGMDLQACIDLIEKPMGIMSILEEECMFPKATDMTFKAKLYDNHLGKSNNFQKPRNIKGKQEAHFSLIHYAGTVDYNILGWLEKNKDPLNETVVALYQKSSLKLMATLFSSYATADTGDSGKSKGGKKKGSSFQTVSALHRENLNKLMTNLRTTHPHFVRCIIPNERKAPGVMDNPLVMHQLRCNGVLEGIRICRKGFPNRILYGDFRQRYRILNPVAIPEGQFIDSRKGTEKLLSSLDIDHNQYKFGHTKVFFKAGLLGLLEEMRDERLSRIITRMQAQARGQLMRIEFKKIVERRDALLVIQWNIRAFMGVKNWPWMKLYFKIKPLLKSAETEKEMATMKEEFGRIKETLEKSEARRKELEEKMVSLLQEKNDLQLQVQAEQDNLNDAEERCDQLIKNKIQLEAKVKEMNERLEDEEEMNAELTAKKRKLEDECSELKKDIDDLELTLAKVEKEKHATENKVKNLTEEMAGLDEIIAKLTKEKKALQEAHQQALDDLQVEEDKVNSLSKSKVKLEQQVDDLEGSLEQEKKVRMDLERAKRKLEGDLKLTQESIMDLENDKLQLEEKLKKKEFDINQQNSKIEDEQVLALQLQKKLKENQARIEELEEELEAERTARAKVEKLRSDLSRELEEISERLEEAGGATSVQIEMNKKREAEFQKMRRDLEEATLQHEATAAALRKKHADSVAELGEQIDNLQRVKQKLEKEKSEFKLELDDVTSNMEQIIKAKANLEKVSRTLEDQANEYRVKLEEAQRSLNDFTTQRAKLQTENGELARQLEEKEALISQLTRGKLSYTQQMEDLKRQLEEEGKAKNALAHALQSARHDCDLLREQYEEETEAKAELQRVLSKANSEVAQWRTKYETDAIQRTEELEEAKKKLAQRLQDAEEAVEAVNAKCSSLEKTKHRLQNEIEDLMVDVERSNAAAAALDKKQRNFDKILAEWKQKYEESQSELESSQKEARSLSTELFKLKNAYEESLEHLETFKRENKNLQEEISDLTEQLGEGGKNVHELEKVRKQLEVEKLELQSALEEAEASLEHEEGKILRAQLEFNQIKAEIERKLAEKDEEMEQAKRNHQRVVDSLQTSLDAETRSRNEVLRVKKKMEGDLNEMEIQLSHANRMAAEAQKQVKSLQSLLKDTQIQLDDAVRANDDLKENIAIVERRNNLLQAELEELRAVVEQTERSRKLAEQELIETSERVQLLHSQNTSLINQKKKMESDLTQLQSEVEEAVQECRNAEEKAKKAITDAAMMAEELKKEQDTSAHLERMKKNMEQTIKDLQHRLDEAEQIALKGGKKQLQKLEARVRELEGELEAEQKRNAESVKGMRKSERRIKELTYQTEEDKKNLLRLQDLVDKLQLKVKAYKRQAEEAEEQANTNLSKFRKVQHELDEAEERADIAESQVNKLRAKSRDIGAKQKMHDEE

SEQ ID NO: 403 - protein, 1684 aa, Homo sapiens
MEDLVQDGVASPATPGTGKSKLETLPKEDLIKFAKKQMMLIQKAKSRCTELEKEIEELRSKPVTEGTGDIIKALTERLDALLLEKAETEQQCLSLKKENIKMKQEVEDSVTKMGDAHKELEQSHINYVKEIENLKNELMAVRSKYSEDKANLQKQLEEAMNTQLELSEQLKFQNNSEDNVKKLQEEIEKIRPGFEEQILYLQKQLDATTDEKKETVTQLQNIIEANSQHYQKNINSLQEELLQLKAIHQEEVKELMCQIEASAKEHEAEINKLNELKENLVKQCEASEKNIQKKYECELENLRKATSNANQDNQICSILLQENTFVEQVVNEKVKHLEDTLKELESQHSILKDEVTYMNNLKLKLEMDAQHIKDEFFHEREDLEFKINELLLAKEEQGCVIEKLKSELAGLNKQFCYTVEQHNREVQSLKEQHQKEISELNETFLSDSEKEKLTLMFEIQGLKEQCENLQQEKQEAILNYESLREIMEILQTELGESAGKISQEFESMKQQQASDVHELQQKLRTAFTEKDALLETVNRLQGENEKLLSQQELVPELENTIKNLQEKNGVYLLSLSQRDTMLKELEGKINSLTEEKDDFINKLKNSHEEMDNFHKKCEREERLILELGKKVEQTIQYNSELEQKVNELTGGLEETLKEKDQNDQKLEKLMVQMKVLSEDKEVLSAEVKSLYEENNKLSSEKKQLSRDLEVFLSQKEDVILKEHITQLEKKLQLMVEEQDNLNKLLENEQVQKLFVKTQLYGFLKEMGSEVSEDSEEKDVVNVLQAVGESLAKINEEKCNLAFQRDEKVLELEKEIKCLQEESVVQCEELKSLLRDYEQEKVLLRKELEEIQSEKEALQSDLLEMKNANEKTRLENQNLLIQVEEVSQTCSKSEIHNEKEKCFIKEHENLKPLLEQKELRDRRAELILLKDSLAKSPSVKNDPLSSVKELEEKIENLEKECKEKEEKINKIKLVAVKAKKELDSSRKETQTVKEELESLRSEKDQLSASMRDLIQGAESYKNLLLEYEKQSEQLDVEKERANNFEHRIEDLTRQLRNSTLQCETINSDNEDLLARIETLQSNAKLLEVQILEVQRAKAMVDKELEAEKLQKEQKIKEHATTVNELEELQVQLQKEKKQLQKTMQELELVKKDAQQTTLMNMEIADYERLMKELNQKLTNKNNKIEDLEQEIKIQKQKQETLQEEITSLQSSVQQYEEKNTKIKQLLVKTKKELADSKQAETDHLILQASLKGELEASQQQVEVYKIQLAEITSEKHKIHEHLKTSAEQHQRTLSAYQQRVTALQEECRAAKAEQATVTSEFESYKVRVHNVLKQQKNKSMSQAETEGAKQEREHLEMLIDQLKIKLQDSQNNLQINVSELQTLQSEHDTLLERHNKMLQETVSKEAELREKLCSIQSENMMMKSEHTQTVSQLTSQNEVLRNSFRDQVRHLQEEHRKTVETLQQQLSKMEAQLFQLKNEPTTRSPVSSQQSLKNLRERRNTDLPLLDMHTVTREEGEGMETTDTESVSSASTYTQSLEQLLNSPETKLEPPLWHAEFTKEELVQKLSSTTKSADHLNGLLRETEATNAILMEQIKLLKSEIRRLERNQEREKSAANLEYLKNVLLQFIFLKPGSERERLLPVINTMLQLSPEEKGKLAAVAQGEEENASRSSGWASYLHSWSGLR

SEQ ID NO: 404 - protein, 2863 aa, Homo sapiens
MASEDNRVPSPPPTGDDGGGGGREETPTEGGALSLKPGLPIRGIRMKFAVLTGLVEVGEVSNRDIVETVFNLLVGGQFDLEMNFIIQEGESINCMVDLLEKCDITCQAEVWSMFTAILKKSIRNLQVCTEVGLVEKVLGKIEKVDNMIADLLVDMLGVLASYNLTVRELKLFFSKLQGDKGRWPPHAGKLLSVLKHMPQKYGPDAFFNFPGKSAAAIALPPIAKWPYQNGFTFHTWLRMDPVNNINVDKDKPYLYCFRTSKGLGYSAHFVGGCLIVTSIKSKGKGFQHCVKFDFKPQKWYMVTIVHIYNRWKNSELRCYVNGELASYGEITWFVNTSDTFDKCFLGSSETADANRVFCGQMTAVYLFSEALNAAQIFAIYQLGLGYKGTFKFKAESDLFLAEHHKLLLYDGKLSSAIAFTYNPRATDAQLCLESSPKDNPSIFVHSPHALMLQDVKAVLTHSIQSAMHSIGGVQVLFPLFAQLDYRQYLSDEIDLTICSTLLAFIMELLKNSIAMQEQMLACKGFLVIGYSLEKSSKSHVSRAVLELCLAFSKYLSNLQNGMPLLKQLCDHVLLNPAIWIHTPAKVQLMLYTYLSTEFIGTVNIYNTIRRVGTVLLIMHTLKYYYWAVNPQDRSGITPKGLDGPRPNQKEMLSLRAFLLMFIKQLVMKDSGVKEDELQAILNYLLTMHEDDNLMDVLQLLVALMSEHPNSMIPAFDQRNGLRVIYKLLASKSEGIRVQALKAMGYFLKHLAPKRKAEVMLGHGLFSLLAERLMLQTNLITMTTYNVLFEILIEQIGTQVIHKQHPDPDSSVKIQNPQILKVIATLLRNSPQCPESMEVRRAFLSDMIKLFNNSRENRRSLLQCSVWQEWMLSLCYFNPKNSDEQKITEMVYAIFRILLYHAVKYEWGGWRVWVDTLSITHSKVTFEIHKENLANIFREQQGKVDEEIGLCSSTSVQAASGIRRDINVSVGSQQPDTKDSPVCPHFTTNGNENSSIEKTSSLESASNIELQTTNTSYEEMKAEQENQELPDEGTLEETLTNETRNADDLEVSSDIIEAVAISSNSFITTGKDSMTVSEVTASISSPSEEDASEMPEFLDKSIVEEEEDDDYVELKVEGSPTEEANLPTELQDNSLSPAASEAGEKLDMFGNDDKLIFQEGKPVTEKQTDTETQDSKDSGIQTMTASGSSAMSPETTVSQIAVESDLGQMLEEGKKATNLTRETKLINDCHGSVSEASSEQKIAKLDVSNVATDTERLELKASPNVEAPQPHRHVLEISRQHEQPGQGIAPDAVNGQRRDSRSTVFRIPEFNWSQMHQRLLTDLLFSIETDIQMWRSHSTKTVMDFVNSSDNVIFVHNTIHLISQVMDNMVMACGGILPLLSAATSATHELENIEPTQGLSIEASVTFLQRLISLVDVLIFASSLGFTEIEAEKSMSSGGILRQCLRLVCAVAVRNCLECQQHSQLKTRGDKALKPMHSLIPLGKSAAKSPVDIVTGGISPVRDLDRLLQDMDINRLRAVVFRDIEDSKQAQFLALAVVYFISVLMVSKYRDILEPQNERHSQSCTETGSENENVSLSEITPAAFSTLTTASVEESESTSSARRRDSGIGEETATGLGSHVEVTPHTAPPGVSAGPDAISEVLSTLSLEVNKSPETKNDRGNDLDTKATPSVSVSKNVNVKDILRSLVNIPADGVTVDPALLPPACLGALGDLSVEQPVQFRSFDRSVIVAAKKSAVSPSTFNTSIPTNAVSVVSSVDSAQASDMGGESPGSRSSNAKLPSVPTVDSVSQDPVSNMSITERLEHALEKAAPLLREIFVDFAPFLSRTLLGSHGQELLIEGTSLVCMKSSSSVVELVMLLCSQEWQNSIQKNAGLAFIELVNEGRLLSQTMKDHLVRVANEAEFILSRQRAEDIHRHAEFESLCAQYSADKREDEKMCDHLIRAAKYRDHVTATQLIQKIINILTDKHGAWGNSAVSRPLEFWRLDYWEDDLRRRRRFVRNPLGSTHPEATLKTAVEHVCIFKLRENSKATDEDILAKGKQSIRSQALGNQNSENEILLEGDDDTLSSVDEKDLENLAGPVSLSTPAQLVAPSVVVKGTLSVTSSELYFEVDEEDPNFKKIDPKILAYTEGLHGKWLFTEIRSIFSRRYLLQNTALEIFMANRVAVMFNFPDPATVKKVVNYLPRVGVGTSFGLPQTRRISLASPRQLFKASNMTQRWQHREISNFEYLMFLNTIAGRSYNDLNQYPVFPWVITNYESEELDLTLPTNFRDLSKPIGALNPKRAAFFAERYESWEDDQVPKFHYGTHYSTASFVLAWLLRIEPFTTYFLNLQGGKFDHADRTFSSISRAWRNSQRDTSDIKELIPEFYYLPEMFVNFNNYNLGVMDDGTVVSDVELPPWAKTSEEFVHINRLALESEFVSCQLHQWIDLIFGYKQQGPEAVRALNVFYYLTYEGAVNLNSITDPVLREAVEAQIRSFGQTPSQLLIEPHPPRGSAMQVSPLMFTDKAQQDVIMVLKFPSNSPVTHVAANTQPGLATPAVITVTANRLFAVNKWHNLPAHQGAVQDQPYQLPVEIDPLIASNTGMHRRQITDLLDQSIQVHSQCFVITSDNRYILVCGFWDKSFRVYSTDTGRLIQVVFGHWDVVTCLARSESYIGGNCYILSGSRDATLLLWYWNGKCSGIGDNPGSETAAPRAILTGHDYEVTCAAVCAELGLVLSGSQEGPCLIHSMNGDLLRTLEGPENCLKPKLIQASREGHCVIFYENGLFCTFSVNGKLQATMETDDNIRAIQLSRDGQYLLTGGDRGVVVVRQVSDLKQLFAYPGCDAGIRAMALSYDQRCIISGMASGSIVLFYNDFNRWHHEYQTRY

SEQ ID NO: 405 - protein, 2275 aa, Homo sapiens
MAAERRCGSMRDLRAQVTSGLLPFPEVTLQALGEDEITLESVLRGKFAAGKNGLACLACGPQLEVVNSITGERLSAYRFSGVNEQPPVVLAVKEFSWQKRTGLLIGLEETEGSVLCLYDLGISKVVKAVVLPGRVTAIEPIINHGGASASTQHLHPSLRWLFGVAAVVTDVGQILLVDLCLDDLSCNQNEVEASDLEVLTGIPAEVPHIRESVMRQGRHLCFQLVSPTGTAVSTLSYISRTNQLAVGFSDGYLALWNMKSMKREYYIQLESGQVPVYAVTFQEPENDPRNCCYLWAVQSTQDSEGDVLSLHLLQLAFGNRKCLASGQILYEGLEYCEERYTLDLTGGMFPLRGQTSNTKLLGCQSIEKFRSHGDREEGVNEALSPDTSVSVFTWQVNIYGQGKPSVYLGLFDINRWYHAQMPDSLRSGEYLHNCSYFALWSLESVVSRTSPHGILDILVHERSLNRGVPPSYPPPEQFFNPSTYNFDATCLLNSGVVHLTCTGFQKETLTFLKKSGPSLNELIPDGYNRCLVAGLLSPRFVDVQPSSLSQEEQLEAILSAAIQTSSLGLLTGYIRRWITEEQPNSATNLRFVLEWTWNKVVLTKEEFDRLCVPLFDGSCHFMDPQTIQSIQQCYLLLSNLNIVLSCFASEAREITERGLIDLSNKFVVSHLICQYAQVVLWFSHSGLLPEGIDDSVQLSRLCYNYPVIQNYYTSRRQKFERLSRGKWNPDCLMIDGLVSQLGERIEKLWKRDEGGTGKYPPASLHAVLDMYLLDGVTEAAKHSITIYLLLDIMYSFPNKTDTPIESFPTVFAISWGQVKLIQGFWLIDHNDYESGLDLLFHPATAKPLSWQHSKIIQAFMSQGEHRQALRYIQTMKPTVSSGNDVILHLTVLLFNRCMVEAWNFLRQHCNRLNIEELLKHMYEVCQEMGLMEDLLKLPFTDTEQECLVKFLQSSASVQNHEFLLVHHLQRANYVPALKLNQTLKINVMNDRDPRLRERSLARNSILDQYGKILPRVHRKLAIERAKPYHLSTSSVFRLVSRPKPLSAVPKQVVTGTVLTRSVFINNVLSKIGEVWASKEPINSTTPFNSSKIEEPSPIVYSLPAPELPEAFFGTPISKASQKISRLLDLVVQPVPRPSQCSEFIQQSSMKSPLYLVSRSLPSSSQLKGSPQAISRASELHLLETPLVVKKAKSLAMSVTTSGFSEFTPQSILRSTLRSTPLASPSPSPGRSPQRLKETRISFVEEDVHPKWIPGAADDSKLEVFTTPKKCAVPVETEWLKSKDRTTSFFLNSPEKEHQEMDEGSQSLEKLDVSKGNSSVSITSDETTLEYQDAPSPEDLEETVFTASKPKSSSTALTTNVTEQTEKDGDKDVFASEVTPSDLQKQMGNLEDAETKDLLVAAEAFSELNHLSPVQGTEASLCAPSVYEGKIFTQKSKVPVLDEGLTSVETYTPAIRANDNKSMADVLGDGGNSSLTISEGPIVSERRLNQEVALNLKEDHEVEVGVLKESVDLPEEKLPISDSPPDTQEIHVIEQEKLEAQDSGEEARNLSFNELYPSGTLKLQYNFDTIDQQFCDLADNKDTAECDIAEVDGELFVAQSNFTLILEGEEGEVEPGDFASSDVLPKAANTATEEKLVCSGENDNHGQIANLPSAVTSDQKSQKVDTLPYVPEPIKVAIAENLLDVIKDTRSKEITSDTMEQSIHETIPLVSQNIMCPTKLVKSAFKTAQETSTMTMNVSQVDDVVSSKTRTRGQRIQNVNVKSAQQEASADVATPKMPGQSVRKKTRKAKEISEASENIYSDVRGLSQNQQIPQNSVTPRRGRRKKEVNQDILENTSSVEQELQITTGRESKRLKSSQLLEPAVEETTKKEVKVSSVTKRTPRRIKRSVENQESVEIINDLKVSTVTSPSRMIRKLRSTNLDASENTGNKQDDKSSDKQLRIKHVRRVRGREVSPSDVREDSNLESSQLTVQAEFDMSAIPRKRGRPRKINPSEDVGSKAVKEERSPKKKEAPSIRRRSTRNTPAKSENVDVGKPALGKSILVPNEELSMVMSSKKKLTKKTESQSQKRSLHSVSEERTDEMTHKETNEQEERLLATASFTKSSRSSRTRSSKAILLPDLSEPNNEPLFSPASEVPRKAKAKKIEVPAQLKELVSDLSSQFVISPPALRSRQKNTSNKNKLEDELKDDAQSVETLGKPKAKRIRTSKTKQASKNTEKESAWSPPPIEIRLISPLASPADGVKSKPRKTTEVTGTGLGRNRKKLSSYPKQILRRKML

SEQ ID NO: 406 - protein, 1430 aa, Homo sapiens
MTSAAEIKKPPVAPKPKFVVANNKPAPPPIAPKPDIVISSVPQSTKKMKPAIAPKPKVLKTSPVREIGQSPSRKIMLNLEGHKQELAESTDNFNCKYEGNQSNDYISPMCSCSSECIHKLGHRENLCVKQLVLEPLEMNENLENSKIDETLTIKTRSKCDLYGEKAKNQGGVVLKASVLEEELKDALIHQMPPFISAQKHRPTDSPEMNGGCNSNGQFRIEFADLSPSPSSFEKVPDHHSCHLQLPSDECEHFETCQDDSEKSNNCFQSSELEALENGKRSTLISSDGVSKKSEVKDLGPLEIHLVPYTPKFPTPKPRKTRTARLLRQKCVDTPSESTEEPGNSDSSSSCLTENSLKINKISVLHQNVLCKQEQVDKMKLGNKSELNMESNSDAQDLVNSQKAMCNETTSFEKMAPSFDKDSNLSSDSTTVDGSSMSLAVDEGTGFIRCTVSMSLPKQLKLTCNEHLQSGRNLGVSAPQMQKESVIKEENSLRIVPKKPQRHSLPATGVLKKAASEELLEKSSYPSSEEKSSEKSLERNHLQHLCAQNRGVSSSFDMPKRASEKPVWKLPHPILPFSGNPEFLKSVTVSSNSEPSTALTKPRAKSLSAMDVEKCTKPCKDSTKKNSFKKLLSMKLSICFMKSDFQKFWSKSSQLGDTTTGHLSSGEQKGIESDWQGLLVGEEKRSKPIKAYSTENYSLESQKKRKKSRGQTSAANGLRAESLDDQMLSRESSSQAPYKSVTSLCAPEYENIRHYEEIPEYENLPFIMAIRKTQELEWQNSSSMEDADANVYEVEEPYEAPDGQLQLGPRHQHSSSGASQEEQNDLGLGDLPSDEEEIINSSDEDDVSSESSKGEPDPLEDKQDEDNGMKSKVHHIAKEIMSSEKVFVDVLKLLHIDFRDAVAHASRQLGKPVIEDRILNQILYYLPQLYELNRDLLKELEERMLHWTEQQRIADIFVKKGPYLKMYSTYIKEFDKNIALLDEQCKKNPGFAAVVREFEMSPRCANLALKHYLLKPVQRIPQYRLLLTDYLKNLIEDAGDYRDTQDALAVVIEVANHANDTMKQGDNFQKLMQIQYSLNGHHEIVQPGRVFLKEGILMKLSRKVMQPRMFFLFNDALLYTTPVQSGMYKLNNMLSLAGMKVRKPTQEAYQNELKIESVERSFILSASSATERDEWLEAISRAIEEYAKKRITFCPSRSLDEADSENKEEVSPLGSKAPIWIPDTRATMCMICTSEFTLTWRRHHCRACGKIVCQACSSNKYGLDYLKNQPARVCEHCFQELQKLDHQHSPRIGSPGNHKSPSSALSSVLHSIPSGRKQKKIPAALKEVSANTEDSSMSGYLYRSKGNKKPWKHFWFVIKNKVLYTYAASEDVAALESQPLLGFTVIQVKDENSESKVFQLLHKNMLFYVFKAEDAHSAQKWIEAFQEGTIL

SEQ ID NO: 407 - protein, 1591 aa, Homo sapiens
MSLLCVRVKRAKFQGSPDKFNTYVTLKVQNVKSTTVAVRGDQPSWEQDFMFEISRLDLGLSVEVWNKGLIWDTMVGTVWIALKTIRQSDEEGPGEWSTLEAETLMKDDEICGTRNPTPHKILLDTRFELPFDIPEEEARYWTYKWEQINALGADNEYSSQEESQRKPLPTAAAQCSFEDPDSAVDDRDSDYRSETSNSFPPPYHTASQPNASVHQFPVPVRSPQQLLLQGSSRDSCNDSMQSYDLDYPERRAISPTSSSRYGSSCNVSQGSSQLSELDQYHEQDDDHRETDSIHSCHSSHSLSRDGQAGFGEQEKPLEVTGQAEKEAACEPKEMKEDATTHPPPDLVLQKDHFLGPQESFPEENASSPFTQARAHWIRAVTKVRLQLQEIPDDGDPSLPQWLPEGPAGGLYGIDSMPDLRRKKPLPLVSDLSLVQSRKAGITSAMATRTSLKDEELKSHVYKKTLQALIYPISCTTPHNFEVWTATTPTYCYECEGLLWGIARQGMRCSECGVKCHEKCQDLLNADCLQRAAEKSCKHGAEDRTQNIIMAMKDRMKIRERNKPEIFEVIRDVFTVNKAAHVQQMKTVKQSVLDGTSKWSAKITITVVCAQGLQAKDKTGSSDPYVTVQVSKTKKRTKTIFGNLNPVWEEKFHFECHNSSDRIKVRVWDEDDDIKSRVKQRLKRESDDFLGQTIIEVRTLSGEMDVWYNLEKRTDKSAVSGAIRLQISVEIKGEEKVAPYHVQYTCLHENLFHYLTDIQGSGGVRIPEARGDDAWKVYFDETAQEIVDEFAMRYGIESIYQAMTHFACLSSKYMCPGVPAVMSTLLANINAYYAHTTASTNVSASDRFAASNFGKERFVKLLDQLHNSLRIDLSTYRNNFPAGSPERLQDLKSTVDLLTSITFFRMKVQELQSPPRASQVVKDCVKACLNSTYEYIFNNCHDLYSRQYQLKQELPPEEQGPSIRNLDFWPKLITLIVSIIEEDKNSYTPVLNQFPQELNVGKVSAEVMWHLFAQDMKYALEEHEKDHLCKSADYMNLHFKVKWLHNEYVRDLPVLQGQVPEYPAWFEQFVLQWLDENEDVSLEFLRGALERDKKDGFQQTSEHALFSCSVVDVFTQLNQSFEIIRKLECPDPSILAHYMRRFAKTIGKVLMQYADILSKDFPAYCTKEKLPCILMNNVQQLRVQLEKMFEAMGGKELDLEAADSLKELQVKLNTVLDELSMVFGNSFQVRIDECVRQMADILGQVRGTGNASPDARASAAQDADSVLRPLMDFLDGNLTLFATVCEKTVLKRVLKELWRVVMNTMERMIVLPPLTDQTGTQLIFTAAKELSHLSKLKDHMVREETRNLTPKQCAVLDLALDTIKQYFHAGGNGLKKTFLEKSPDLQSLRYALSLYTQTTDTLIKTFVRSQTTQGSGVDDPVGEVSIQVDLFTHPGTGEHKVTVKVVAANDLKWQTAGMFRPFVEVTMVGPHQSDKKRKFTTKSKSNNWAPKYNETFHFLLGNEEGPESYELQICVKDYCFAREDRVLGLAVMPLRDVTAKGSCACWCPLGRKIHMDETGLTILRILSQRSNDEVAREFVKLKSESRSTEEGS

SEQ ID NO: 408 - protein, 1371 aa, Homo sapiens
MTEESSDVPRELIESIKDVIGRKIKISVKKKVKLEVKGDKVENKVLVLTSCRAFLVTARIPTKLELTFSYLEIHGVVCSKSAQMIVETEKCSISMKMASPEDVSEVLAHIGTCLRKIFPGLSPVRIMKKVSMEPSERLASLQALWDSQTVAEQGPCGGFSQMYACVCDWLGFSYREEVQWDVDTIYLTQDTRELNLQDFSHLDHRDLIPIIAALEYNQWFTKLSSKDLKLSTDVCEQILRVVSRSNRLEELVLENAGLRTDFAQKLASALAHNPNSGLHTINLAGNPLEDRGVSSLSIQFAKLPKGLKHLNLSKTSLSPKGVNSLSQSLSANPLTASTLVHLDLSGNVLRGDDLSHMYNFLAQPNAIVHLDLSNTECSLDMVCGALLRGCLQYLAVLNLSRTVFSHRKGKEVPPSFKQFFSSSLALMHINLSGTKLSPEPLKALLLGLACNHNLKGVSLDLSNCELRSGGAQVLEGCIAEIHNITSLDISDNGLESDLSTLIVWLSKNRSIQHLALGKNFNNMKSKNLTPVLDNLVQMIQDEESPLQSLSLADSKLKTEVTIIINALGSNTSLTKVDISGNGMGDMGAKMLAKALQINTKLRTVIWDKNNITAQGFQDIAVAMEKNYTLRFMPIPMYDASQALKTNPEKTEDALQKIENYLLRNHETRKYLQEQAYRLQQGIVTSTTQQMIDRICVKVQDHLNSLRNCGGDAIQEDLKSAERLMRDAKNSKTLLPNLYHVGGASWAGASGLLSSPIQETLESMAGEVTRVVDEQLKALLESMVDAAENLCPNVMKKAHIRQDLIHASTEKISIPRTFVKNVLLEQSGIDILNKISEVKLTVASFLSDRIVDEILDALSHCHHKLADHFSRRGKTLPQQESLEIELAEEKPVKRSIITVEELTEIERLEDLDTCMMTPKSKRKSIHSRMLRPVSRAFEMEFDLDKALEEVPIHIEDPPFPSLRQEKRSSGFISELPSEEGKKLEHFTKLRPKRNKKQQPTQAAVCAANIVSQDGEQNGLMGRVDEGVDEFFTKKVTKMDSKKWSTRGSESHELNEGGDEKKKRDSRKSSGFLNLIKSRSKSERPPTILMTEEPSSPKGAVRSPPVDCPRKDTKAAEHNGNSERIEEIKTPDSFEESQGEEIGKVERSDSKSSPQAGRRYGVQVMGSGLLAEMKAKQEKRAACAQKKLGNDAVSQDSSSPALSGVERSDGGGAVPKLHPGLPENRFGLGTPEKNTKAEPKAEAGSRSRSSSSTPTSPKPLLQSPKPSLAARPVIPQKPRTASRPDDIPDSPSSPKVALLPPVLKKVPSDKERDGQSSPQPSPRTFSQEVSRRSWGQQAQEYQEQKQRSSSKDGHQGSKSNDSGEEAEKEFIFV

SEQ ID NO: 409 - protein, 2017 aa, Homo sapiens
MSLGLARAQEVELTLETVIQTLESSVLCQEKGLGARDLAQDAQITSLPALIREIVTRNLSQPESPVLLPATEMASLLSLQEENQLLQQELSRVEDLLAQSRAERDELAIKYNAVSERLEQALRLEPGELETQEPRGLVRQSVELRRQLQEEQASYRRKLQAYQEGQQRQAQLVQRLQGKILQYKKRCSELEQQLLERSGELEQQRLRDTEHSQDLESALIRLEEEQQRSASLAQVNAMLREQLDQAGSANQALSEDIRKVTNDWTRCRKELEHREAAWRREEESFNAYFSNEHSRLLLLWRQVVGFRRLVSEVKMFTERDLLQLGGELARTSRAVQEAGLGLSTGLRLAESRAEAALEKQALLQAQLEEQLRDKVLREKDLAQQQMQSDLDKADLSARVTELGLAVKRLEKQNLEKDQVNKDLTEKLEALESLRLQEQAALETEDGEGLQQTLRDLAQAVLSDSESGVQLSGSERTADASNGSLRGLSGQRTPSPPRRSSPGRGRSPRRGPSPACSDSSTLALIHSALHKRQLQVQDMRGRYEASQDLLGTLRKQLSDSESERRALEEQLQRLRDKTDGAMQAHEDAQREVQRLRSANELLSREKSNLAHSLQVAQQQAEELRQEREKLQAAQEELRRQRDRLEEEQEDAVQDGARVRRELERSHRQLEQLEGKRSVLAKELVEVREALSRATLQRDMLQAEKAEVAEALTKAEAGRVELELSMTKLRAEEASLQDSLSKLSALNESLAQDKLDLNRLVAQLEEEKSALQGRQRQAEQEATVAREEQERLEELRLEQEVARQGLEGSLRVAEQAQEALEQQLPTLRHERSQLQEQLAQLSRQLSGREQELEQARREAQRQVEALERAAREKEALAKEHAGLAVQLVAAEREGRTLSEEATRLRLEKEALEGSLFEVQRQLAQLEARREQLEAEGQALLLAKETLTGELAGLRQQIIATQEKASLDKELMAQKLVQAEREAQASLREQRAAHEEDLQRLQREKEAAWRELEAERAQLQSQLQREQEELLARLEAEKEELSEEIAALQQERDEGLLLAESEKQQALSLKESEKTALSEKLMGTRHSLATISLEMERQKRDAQSRQEQDRSTVNALTSELRDLRAQREEAAAAHAQEVRRLQEQARDLGKQRDSCLREAEELRTQLRLLEDARDGLRRELLEAQRKLRESQEGREVQRQEAGELRRSLGEGAKEREALRRSNEELRSAVKKAESERISLKLANEDKEQKLALLEEARTAVGKEAGELRTGLQEVERSRLEARRELQELRRQMKMLDSENTRLGRELAELQGRLALGERAEKESRRETLGLRQRLLKGEASLEVMRQELQVAQRKLQEQEGEFRTRERRLLGSLEEARGTEKQQLDHARGLELKLEAARAEAAELGLRLSAAEGRAQGLEAELARVEVQRRAAEAQLGGLRSALRRGLGLGRAPSPAPRPVPGSPARDAPAEGSGEGLNSPSTLECSPGSQPPSPGPATSPASPDLDPEAVRGALREFLQELRSAQRERDELRTQTSALNRQLAEMEAERDSATSRARQLQKAVAESEEARRSVDGRLSGVQAELALQEESVRRSERERRATLDQVATLERSLQATESELRASQEKISKMKANETKLEGDKRRLKEVLDASESRTVKLELQRRSLEGELQRSRLGLSDREAQAQALQDRVDSLQRQVADSEVKAGTLQLTVERLNGALAKVEESEGALRDKVRGLTEALAQSSASLNSTRDKNLHLQKALTACEHDRQVLQERLDAARQALSEARKQSSSLGEQVQTLRGEVADLELQRVEAEGQLQQLREVLRQRQEGEAAALNTVQKLQDERRLLQERLGSLQRALAQLEAEKREVERSALRLEKDRVALRRTLDKVEREKLRSHEDTVRLSAEKGRLDRTLTGAELELAEAQRQIQQLEAQVVVLEQSHSPAQLEVDAQQQQLELQQEVERLRSAQAQTERTLEARERAHRQRVRGLEEQVSTLKGQLQQELRRSSAPFSPPSGPPEK

SEQ ID NO: 410 - protein, 2017 aa, Homo sapiens
MTSRTKRRQKVKISISKINHSSYRKEHRPFWEHQPPPHQNWAVGGRCGAGARPGLSQRRGREVRREAQGGASSRRLRARLYFSESTSLPLDRRGSPGPLGPAPHGLRRAAPRGPARRTPRSTALTSRRRAQRPRHGDRLRLRSEARPRAAGDWPCARGGAVRPGRPHRPPRVESARGAHAGRAATDQLERVFLRLGHAETDEQLQNIISKFLPPVLLKLSSTQEGVRKKVMELLVHLNKRIKSRPKIQLPVETLLVQYQDPAAVSFVTNFTIIYVKMGYPRLPVEKQCELAPTLLTAMEGKPQPQQDSLMHLLIPTLFHMKYPVESSKSASPFNLAEKPKTVQLLLDFMLDVLLMPYGYVLNESQSRQNSSSAQGSSSNSGGGSGIPQPPPGMSFYAAKRVIGDNPWTPEQLEQCKLGIVKFIEAEQVPELEAVLHLVIASSDTRHSVATAADLELKSKQSLIDWNNPAIINKMYKVYLGDIPLKTKEGAVLKPELKRDPVSTRVKLKIVPHLLRSRQAAETFPANIQVVYDGLFGTNTNSKLRTLSLQFVHHICITCPEIKIKPLGPMLLNGLTKLINEYKEDPKLLSMAYSAVGKLSSRMPHLFTKDIALVQQLFEALCKEEPETRLAIQEALSMMVGAYSTLEGAQRTLMEALVASYLIKPEVQVRQVAVKFASTVFPSDHIPSRYLLLLAAGDPREEVHGEAQRVLRCLPGRNRKESTSEQMPSFPEMVYYIQEKASHRMKTPVKYMTGTTVLPFNPAAFGEIVLYLRMCLAHSAGVVPTSQSLADMQDHAPAIGRYIRTLMSSGQMAPSSSNKSGETNPVQIYIGLLQQLLAGVGGLPVMYCLLEAVSVYPEKLATKFVDKTEWIKSLMNNSKEEMRELAALFYSVVVSTVSGNELKSMIEQLIKTTKDNHSPEIQHGSLLALGFTVGRYLAKKKMRMSEQQDLERNADTLPDQEELIQSATETIGSFLDSTSPLLAIAACTALGEIGRNGPLPIPSEGSGFTKLHLVESLLSRIPSSKETNKMKERAIQTLGYFPVGDGDFPHQKLLLQGLMDSVEAKQIELQFTIGEAITSAAIGTSSVAARDAWQMTEEEYTPPAGAKVNDVVPWVLDVILNKHIISPNPHVRQAACIWLLSLVRKLSTHKEVKSHLKEIQSAFVSVLSENDELSQDVASKGLGLVYELGNEQDQQELVSTLVETLMTGKRVKHEVSGETVVFQGGALGKTPDGQGLSTYKELCSLASDLSQPDLVYKFMNLANHHAMWNSRKGAAFGFNVIATRAGEQLAPFLPQLVPRLYRYQFDPNLGIRQAMTSIWNALVTDKSMVDKYLKEILQDLVKNLTSNMWRVRESSCLALNDLLRGRPLDDIIDKLPEIWETLFRVQDDIKESVRKAAELALKTLSKVCVKMCDPAKGAAGQRTIAALLPCLLDKGMMSTVTEVRALSINTLVKISKSAGAMLKPHAPKLIPALLESLSVLEPQVLNYLSLRATEQEKAAMDSARLSAAKSSPMMETINMCLQYLDVSVLGELVPRLCELIRSGVGLGTKGGCASVIVSLTTQCPQDLTPYSGKLMSALLSGLTDRNSVIQKSCAFAMGHLVRTSRDSSTEKLLQKLNGWYMEKEEPIYKTSCALTIHAIGRYSPDVLKNHAKEVLPLAFLGMHEIADEEKSEKEECNLWTEVWQENVPGSFGGIRLYLQELITITQKALQSQSWKMKAQGAIAMASIAKQTSSLVPPYLGMILTALLQGLAGRTWAGKEELLKAIACVVTACSAELEKSVPNQPSTNEILQAVLKECSKENVKYKIVAISCAADILKATKEDRFQEFSNIVIPLIKKNSLESSGVRTTKNEEENEKEKELQLEYLLGAFESLGKAWPRNAETQRCYRQELCKLMCERLKLSTWKVQLGVLQSMNAFFQGLMLLEEEHADPEALAEILLETCKSITYSLENKTYSSVRTEALSVIELLLKKLEESKQWECLTSECRVLLIESLATMEPDSRPELQEKAALLKKTLENLE

SEQ ID NO: 411 - protein, 3256 aa, Homo sapiens
MWPTRRLVTIKRSGVDGPHFPLSLSTCLFGRGIECDIRIQLPVVSKQHCKIEIHEQEAILHNFSSTNPTQVNGSVIDEPVRLKHGDVITIIDRSFRYENESLQNGRKSTEFPRKIREQEPARRVSRSSFSSDPDEKAQDSKAYSKITEGKVSGNPQVHIKNVKEDSTADDSKDSVAQGTTNVHSSEHAGRNGRNAADPISGDFKEISSVKLVSRYGELKSVPTTQCLDNSKKNESPFWKLYESVKKELDVKSQKENVLQYCRKSGLQTDYATEKESADGLQGETQLLVSRKSRPKSGGSGHAVAEPASPEQELDQNKGKGRDVESVQTPSKAVGASFPLYEPAKMKTPVQYSQQQNSPQKHKNKDLYTTGRRESVNLGKSEGFKAGDKTLTPRKLSTRNRTPAKVEDAADSATKPENLSSKTRGSIPTDVEVLPTETEIHNEPFLTLWLTQVERKIQKDSLSKPEKLGTTAGQMCSGLPGLSSVDINNFGDSINESEGIPLKRRRVSFGGHLRPELFDENLPPNTPLKRGEAPTKRKSLVMHTPPVLKKIIKEQPQPSGKQESGSEIHVEVKAQSLVISPPAPSPRKTPVASDQRRRSCKTAPASSSKSQTEVPKRGGRKSGNLPSKRVSISRSQHDILQMICSKRRSGASEANLIVAKSWADVVKLGAKQTQTKVIKHGPQRSMNKRQRRPATPKKPVGEVHSQFSTGHANSPCTIIIGKAHTEKVHVPARPYRVLNNFISNQKMDFKEDLSGIAEMFKTPVKEQPQLTSTCHIAISNSENLLGKQFQGTDSGEEPLLPTSESFGGNVFFSAQNAAKQPSDKCSASPPLRRQCIRENGNVAKTPRNTYKMTSLETKTSDTETEPSKTVSTANRSGRSTEFRNIQKLPVESKSEETNTEIVECILKRGQKATLLQQRREGEMKEIERPFETYKENIELKENDEKMKAMKRSRTWGQKCAPMSDLTDLKSLPDTELMKDTARGQNLLQTQDHAKAPKSEKGKITKMPCQSLQPEPINTPTHTKQQLKASLGKVGVKEELLAVGKFTRTSGETTHTHREPAGDGKSIRTFKESPKQILDPAARVTGMKKWPRTPKEEAQSLEDLAGFKELFQTPGPSEESMTDEKTTKIACKSPPPESVDTPTSTKQWPKRSLRKADVEEEFLALRKLTPSAGKAMLTPKPAGGDEKDIKAFMGTPVQKLDLAGTLPGSKRQLQTPKEKAQALEDLAGFKELFQTPGHTEELVAAGKTTKIPCDSPQSDPVDTPTSTKQRPKRSIRKADVEGELLACRNLMPSAGKAMHTPKPSVGEEKDIIIFVGTPVQKLDLTENLTGSKRRPQTPKEEAQALEDLTGFKELFQTPGHTEEAVAAGKTTKMPCESSPPESADTPTSTRRQPKTPLEKRDVQKELSALKKLTQTSGETTHTDKVPGGEDKSINAFRETAKQKLDPAASVTGSKRHPKTKEKAQPLEDLAGLKELFQTPVCTDKPTTHEKTTKIACRSQPDPVDTPTSSKPQSKRSLRKVDVEEEFFALRKRTPSAGKAMHTPKPAVSGEKNIYAFMGTPVQKLDLTENLTGSKRRLQTPKEKAQALEDLAGFKELFQTRGHTEESMTNDKTAKVACKSSQPDPDKNPASSKRRLKTSLGKVGVKEELLAVGKLTQTSGETTHTHTEPTGDGKSMKAFMESPKQILDSAASLTGSKRQLRTPKGKSEVPEDLAGFIELFQTPSHTKESMTNEKTTKVSYRASQPDLVDTPTSSKPQPKRSLRKADTEEEFLAFRKQTPSAGKAMHTPKPAVGEEKDINTFLGTPVQKLDQPGNLPGSNRRLQTRKEKAQALEELTGFRELFQTPCTDNPTTDEKTTKKILCKSPQSDPADTPTNTKQRPKRSLKKADVEEEFLAFRKLTPSAGKAMHTPKAAVGEEKDINTFVGTPVEKLDLLGNLPGSKRRPQTPKEKAKALEDLAGFKELFQTPGHTEESMTDDKITEVSCKSPQPDPVKTPTSSKQRLKISLGKVGVKEEVLPVGKLTQTSGKTTQTHRETAGDGKSIKAFKESAKQMLDPANYGTGMERWPRTPKEEAQSLEDLAGFKELFQTPDHTEESTTDDKTTKIACKSPPPESMDTPTSTRRRPKTPLGKRDIVEELSALKQLTQTTHTDKVPGDEDKGINVFRETAKQKLDPAASVTGSKRQPRTPKGKAQPLEDLAGLKELFQTPICTDKPTTHEKTTKIACRSPQPDPVGTPTIFKPQSKRSLRKADVEEESLALRKRTPSVGKAMDTPKPAGGDEKDMKAFMGTPVQKLDLPGNLPGSKRWPQTPKEKAQALEDLAGFKELFQTPGTDKPTTDEKTTKIACKSPQPDPVDTPASTKQRPKRNLRKADVEEEFLALRKRTPSAGKAMDTPKPAVSDEKNINTFVETPVQKLDLLGNLPGSKRQPQTPKEKAEALEDLVGFKELFQTPGHTEESMTDDKITEVSCKSPQPESFKTSRSSKQRLKIPLVKVDMKEEPLAVSKLTRTSGETTQTHTEPTGDSKSIKAFKESPKQILDPAASVTGSRRQLRTRKEKARALEDLVDFKELFSAPGHTEESMTIDKNTKIPCKSPPPELTDTATSTKRCPKTRPRKEVKEELSAVERLTQTSGQSTHTHKEPASGDEGIKVLKQRAKKKPNPVEEEPSRRRPRAPKEKAQPLEDLAGFTELSETSGHTQESLTAGKATKIPCESPPLEVVDTTASTKRHLRTRVQKVQVKEEPSAVKFTQTSGETTDADKEPAGEDKGIKALKESAKQTPAPAASVTGSRRRPRAPRESAQAIEDLAGFKDPAAGHTEESMTDDKTTKIPCKSSPELEDTATSSKRRPRTRAQKVEVKEELLAVGKLTQTSGETTHTDKEPVGEGKGTKAFKQPAKRKLDAEDVIGSRRQPRAPKEKAQPLEDLASFQELSQTPGHTEELANGAADSFTSAPKQTPDSGKPLKISRRVLRAPKVEPVGDVVSTRDPVKSQSKSNTSLPPLPFKRGGGKDGSVTGTKRLRCMPAPEEIVEELPASKKQRVAPRARGKSSEPVVIMKRSLRTSAKRIEPAEELNSNDMKTNKEEHKLQDSVPENKGISLRSRRQNKTEAEQQITEVFVLAERIEINRNEKKPMKTSPEMDIQNPDDGARKPIPRDKVTENKRCLRSARQNESSQPKVAEESGGQKSAKVLMQNQKGKGEAGNSDSMCLRSRKTKSQPAASTLESKSVQRVTRSVKRCAENPKKAEDNVCVKKIRTRSHRDSEDI

SEQ ID NO: 412 - protein, 1478 aa, Homo sapiens
MASTNAESQLQRIIRDLQDAVTELSKEFQEAGEPITDDSTSLHKFSYKLEYLLQFDQKEKATLLGNKKDYWDYFCACLAKVKGANDGIRFVKSISELRTSLGKGRAFIRYSLVHQRLADTLQQCFMNTKVTSDWYYARSPFLQPKLSSDIVGQLYELTEVQFDLASRGFDLDAAWPTFARRTLTTGSSAYLWKPPSRSSSMSSLVSSYLQTQEMVSNFDLNSPLNNEALEGFDEMRLELDQLEVREKQLRERMQQLDRENQELRAAVSQQGEQLQTERERGRTAAEDNVRLTCLVAELQKQWEVTQATQNTVKELQTCLQGLELGAAEKEEDYHTALRRLESMLQPLAQELEATRDSLDKKNQHLASFPGWLAMAQQKADTASDTKGRQEPIPSDAAQEMQELGEKLQALERERTKVEEVNRQQSAQLEQLVKELQLKEDARASLERLVKEMAPLQEELSGKGQEADQLWRRLQELLAHTSSWEEELAELRREKKQQQEEKELLEQEVRSLTRQLQFLETQLAQVSQHVSDLEEQKKQLIQDKDHLSQQVGMLERLAGPPGPELPVAGEKNEALVPVNSSLQEAWGKPEEEQRGLQEAQLDDTKVQEGSQEEELRQANRELEKELQNVVGRNQLLEGKLQALQADYQALQQRESAIQGSLASLEAEQASIRHLGDQMEASLLAVRKAKEAMKAQMAEKEAILQSKEGECQQLREEVEQCQQLAEARHRELRALESQCQQQTQLIEVLTAEKGQQGVGPPTDNEARELAAQLALSQAQLEVHQGEVQRLQAQVVDLQAKMRAALDDQDKVQSQLSMAEAVLREHKTLVQQLKEQNEALNRAHVQELLQCSEREGALQEERADEAQQREEELRALQEELSQAKCSSEEAQLEHAELQEQLHRANTDTAELGIQVCALTVEKERVEEALACAVQELQDAKEAASREREGLERQVAGLQQEKESLQEKLKAAKAAAGSLPGLQAQLAQAEQRAQSLQEAAHQELNTLKFQLSAEIMDYQSRLKNAGEECKSLRGQLEEQGRQLQAAEEAVEKLKATQADMGEKLSCTSNHLAECQAAMLRKDKEGAALREDLERTQKELEKATTKIQEYYNKLCQEVTNRERNDQKMLADLDDLNRTKKYLEERLIELLRDKDALWQKSDALEFQQKLSAEERWLGDTEANHCLDCKREFSWMVRRHHCRICGRIFCYYCCNNYVLSKHGGKKERCCRACFQKLSEGPGSPDSSGSGTSQGEPSPALSPASPGPQATGGQGANTDYRPPDDAVFDIITDEELCQIQESGSSLPETPTETDSLDPNAAEQDTTSTSLTPEDTEDMPVGQDSEICLLKSGELMIKVPLTVDEIASFGEGSRELFVRSSTYSLIPITVAEAGLTISWVFSSDPKSISFSVVFQEAEDTPLDQCKVLIPTTRCNSHKENIQGQLKVRTPGIYMLIFDNTFSRFVSKKVFYHLTVDRPVIYDGSDFL

SEQ ID NO: 413 - protein, 2540 aa, Homo sapiens
MAVETRAELVGKRFLCVAVGDEARSERWESGRGWRSWRAGVIRAVSHRDSRNPDLAVYVEFDDLEWDKREWVKVYEDFSTFLVEYHLIWAKRNDPSQTQGSKSKQIQWPALTFKPLVERNIPSSVTAVEFLVDKQLDFLTEDSAFQPYQDDIDSLNPVLRDNPQLHEEVKVWVKEQKVQEIFMQGPYSLNGYRVRVYRQDSATQWFTGIITHHDLFTRTMIVMNDQVLEPQNVDPSMVQMTFLDDVVHSLLKGENIGITSRRRSRANQNVNAVHSHYTRAQANSPRPAMNSQAAVPKQNTHQQQQQRSIRPNKRKGSDSSIPDEEKMKEEKYDYISRGENPKGKNKHLMNKRRKPEEDEKKLNMKRLRTDNVSDFSESSDSENSNKRIIDNSSEQKPENELKNKNTSKINGEEGKPHNNEKAGEETLKNSQPPWDQIQEDKKHEEAEKRKSVDTQLQEDMIIHSSEQSTVSDHNSNDLLPQECNMDKTHTMELLPKEKFVSRPPTPKCVIDITNDTNLEKVAQENSSTFGLQTLQKMDPNVSDSKHSIANAKFLETAKKDSDQSWVSDVVKVDLTQSSVTNASSGNDHLNMEKEKYVSYISPLSAVSVMEDKLHKRSPPPETIKSKLNTSVDTHKIKSSPSPEVVKPKITHSPDSVKSKATYVNSQATGERRLANKIEHELSRCSFHPIPTRSSTLETTKSPLIIDKNEHFTVYRDPALIGSETGANHISPFLSQHPFPLHSSSHRTCLNPGTHHPALTPAPHLLAGSSSQTPLPTINTHPLTSGPHHAVHHPHLLPTVLPGVPTASLLGGHPRLESAHASSLSHLALAHQQQQQLLQHQSPHLLGQAHPSASYNQLGLYPIIWQYPNGTHAYSGLGLPSSKWVHPENAVNAEASLRRNSPSPWLHQPTPVTSADGIGLLSHIPVRPSSAEPHRPLKITAHSSPPLTKTLVDHHKEELERKAFMEPLRSVASTSAKNDLDLNRSQTGKDCHLHRHFVDPVLNQLQRPPQETGERLNKYKEEHRRILQESIDVAPFTTKIKGLEGERENYSRVASSSSSPKSHIIKQDMDVERSVSDLYKMKHSVPQSLPQSNYFTTLSNSVVNEPPRSYPSKEVSNIYGDKQSNALAAAAANPQTLTSFITSLSKPPPLIKHQPESEGLVGKIPEHLPHQIASHSVTTFRNDCRSPTHLTVSSTNTLRSMPALHRAPVFHPPIHHSLERKEGSYSSLSPPTLTPVMPVNAGGKVQESQKPPTLIPEPKDSQANFKSSSEQSLTEMWRPNNNLSKEKTEWHVEKSSGKLQAAMASVIVRPSSSTKTDSMPAMQLASKDRVSERSSAGAHKTDCLKLAEAGETGRIILPNVNSDSVHTKSEKNFQAVSQGSVPSSVMSAVNTMCNTKTDVITSAADTTSVSSWGGSEVISSLSNTILASTSSECVSSKSVSQPVAQKQECKVSTTAPVTLASSKTGSVVQPSSGFSGTTDFIHLKKHKAALAAAQYKSSNASETEPNAIKNQTLSASLPLDSTVICSTINKANSVGNGQASQTSQPNYHTKLKKAWLTRHSEEDKNTNKMENSGNSVSEIIKPCSVNLIASTSSDIQNSVDSKIIVDKYVKDDKVNRRKAKRTYESGSESGDSDESESKSEQRTKRQPKPTYKKKQNDLQKRKGEIEEDLKPNGVLSRSAKERSKLKLQSNSNTGIPRSVLKDWRKVKKLKQTGESFLQDDSCCEIGPNLQKCRECRLIRSKKGEEPAHSPVFCRFYYFRRLSFSKNGVVRIDGFSSPDQYDDEAMSLWTHENFEDDELDIETSKYILDIIGDKFCQLVTSEKTALSWVKKDAKIAWKRAVRGVREMCDACEATLFNIHWVCQKCGFVVCLDCYKAKERKSSRDKELYAWMKCVKGQPHDHKHLMPTQIIPGSVLTDLLDAMHTLREKYGIKSHCHCTNKQNLQVGNFPTMNGVSQVLQNVLNHSNKISLCMPESQQQNTPPKSEKNGGSSPESDVGTDNKLTPPESQSPLHWLADLAEQKAREEKKENKELTLENQIKEEREQDNSESPNGRTSPLVSQNNEQGSTLRDLLTTTAGKLRVGSTDAGIAFAPVYSMGAPSSKSGRTMPNILDDIIASVVENKIPPSKTSKINVKPELKEEPEESIISAVDENNKLYSDIPHSWICEKHILWLKDYKNSSNWKLFKECWKQGQPAVVSGVHKKMNISLWKAESISLDFGDHQADLLNCKDSIISNANVKEFWDGFEEVSKRQKNKSGETVVLKLKDWPSGEDFKTMMPARYEDLLKSLPLPEYCNPEGKFNLASHLPGFFVRPDLGPRLCSAYGVVAAKDHDIGTTNLHIEVSDVVNILVYVGIAKGNGILSKAGILKKFEEEDLDDILRKRLKDSSEIPGALWHIYAGKDVDKIREFLQKISKEQGLEVLPEHDPIRDQSWYVNKKLRQRLLEEYGVRTCTLIQFLGDAIVLPAGALHQVQNFHSCIQVTEDFVSPEHLVESFHLTQELRLLKEEINYDDKLQVKNILYHAVKEMVRALKIHEDEVEDMEEN

SEQ ID NO: 414 - protein, 2551 aa, Homo sapiens
MMLQHLVIFCLGLVVQNFCSPAETTGQARRCDRKSLLTIRTECRSCALNLGVKCPDGYTMITSGSVGVRDCRYTFEVRTYSLSLPGCRHICRKDYLQPRCCPGRWGPDCIECPGGAGSPCNGRGSCAEGMEGNGTCSCQEGFGGTACETCADDNLFGPSCSSVCNCVHGVCNSGLDGDGTCECYSAYTGPKCDKPIPECAALLCPENSRCSPSTEDENKLECKCLPNYRGDGKYCDPINPCLRKICHPHAHCTYLGPNRHSCTCQEGYRGDGQVCLPVDPCQINFGNCPTKSTVCKYDGPGQSHCECKEHYQNFVPGVGCSMTDICKSDNPCHRNANCTTVAPGRTECICQKGYVGDGLTCYGNIMERLRELNTEPRGKWQGRLTSFISLLDKAYAWPLSKLGPFTVLLPTDKGLKGFNVNELLVDNKAAQYFVKLHIIAGQMNIEYMNNTDMFYTLTGKSGEIFNSDKDNQIKLKLHGGKKKVKIIQGDIIASNGLLHILDRAMDKLEPTFESNNEQTIMTMLQPRYSKFRSLLEETNLGHALDEDGVGGPYTIFVPNNEALNNMKDGTLDYLLSPEGSRKLLELVRYHIVPFTQLEVATLISTPHIRSMANQLIQFNTTDNGQILANDVAMEEIEITAKNGRIYTLTGVLIPPSIVPILPHRCDETKREMKLGTCVSCSLVYWSRCPANSEPTALFTHRCVYSGRFGSLKSGCARYCNATVKIPKCCKGFYGPDCNQCPGGFSNPCSGNGQCADSLGGNGTCICEEGFQGSQCQFCSDPNKYGPRCNKKCLCVHGTCNNRIDSDGACLTGTCRDGSAGRLCDKQTSACGPYVQFCHIHATCEYSNGTASCICKAGYEGDGTLCSEMDPCTGLTPGGCSRNAECIKTGTGTHTCVCQQGWTGNGRDCSEINNCLLPSAGGCHDNASCLYVGPGQNECECKKGFRGNGIDCEPITSCLEQTGKCHPLASCQSTSSGVWSCVCQEGYEGDGFLCYGNAAVELSFLSEAAIFNRWINNASLQPTLSATSNLTVLVPSQQATEDMDQDEKSFWLSQSNIPALIKYHMLLGTYRVADLQTLSSSDMLATSLQGNFLHLAKVDGNITIEGASIVDGDNAATNGVIHIINKVLVPQRRLTGSLPNLLMRLEQMPDYSIFRGYIIQYNLANAIEAADAYTVFAPNNNAIENYIREKKVLSLEEDVLRYHVVLEEKLLKNDLHNGMHRETMLGFSYFLSFFLHNDQLYVNEAPINYTNVATDKGVIHGLGKVLEIQKNRCDNNDTTIIRGRCRTCSSELTCPFGTKSLGNEKRRCIYTSYFMGRRTLFIGCQPKCVRTVITRECCAGFFGPQCQPCPGNAQNVCFGNGICLDGVNGTGVCECGEGFSGTACETCTEGKYGIHCDQACSCVHGRCNQGPLGDGSCDCDVGWRGVHCDNATTEDNCNGTCHTSANCLTNSDGTASCKCAAGFQGNGTICTAINACEISNGGCSAKADCKRTTPGRRVCTCKAGYTGDGIVCLEINPCLENHGGCDKNAECTQTGPNQAACNCLPAYTGDGKVCTLINVCLTKNGGCSEFAICNHTGQVERTCTCKPNYIGDGFTCRGSIYQELPKNPKTSQYFFQLQEHFVKDLVGPGPFTVFAPLSAAFDEEARVKDWDKYGLMPQVLRYHVVACHQLLLENLKLISNATSLQGEPIVISVSQSTVYINNKAKIISSDIISTNGIVHIIDKLLSPKNLLITPKDNSGRILQNLTTLATNNGYIKFSNLIQDSGLLSVITDPIHTPVTLFWPTDQALHALPAEQQDFLFNQDNKDKLKEYLKFHVIRDAKVLAVDLPTSTAWKTLQGSELSVKCGAGRDIGDLFLNGQTCRIVQRELLFDLGVAYGIDCLLIDPTLGGRCDTFTTFDASGECGSCVNTPSCPRWSKPKGVKQKCLYNLPFKRNLEGCRERCSLVIQIPRCCKGYFGRDCQACPGGPDAPCNNRGVCLDQYSATGECKCNTGFNGTACEMCWPGRFGPDCLPCGCSDHGQCDDGITGSGQCLCETGWTGPSCDTQAVLPAVCTPPCSAHATCKENNTCECNLDYEGDGITCTVVDFCKQDNGGCAKVARCSQKGTKVSCSCQKGYKGDGHSCTEIDPCADGLNGGCHEHATCKMTGPGKHKCECKSHYVGDGLNCEPEQLPIDRCLQDNGQCHADAKCVDLHFQDTTVGVFHLRSPLGQYKLTFDKAREACANEAATMATYNQLSYAQKAKYHLCSAGWLETGRVAYPTAFASQNCGSGVVGIVDYGPRPNKSEMWDVFCYRMKDVNCTCKVGYVGDGFSCSGNLLQVLMSFPSLTNFLTEVLAYSNSSARGRAFLEHLTDLSIRGTLFVPQNSGLGENETLSGRDIEHHLANVSMFFYNDLVNGTTLQTRLGSKLLITASQDPLQPTETRFVDGRAILQWDIFASNGIIHVISRPLKAPPAPVTLTHTGLGAGIFFAIILVTGAVALAAYSYFRINRRTIGFQHFESEEDINVAALGKQQPENISNPLYESTTSAPPEPSYDPFTDSEERQLEGNDPLRTL

SEQ ID NO: 415 - protein, 1118 aa, Homo sapiens
MARSPGRAYALLLLLICFNVGSGLHLQVLSTRNENKLLPKHPHLVRQKRAWITAPVALREGEDLSKKNPIAKIHSDLAEERGLKITYKYTGKGITEPPFGIFVFNKDTGELNVTSILDREETPFFLLTGYALDARGNNVEKPLELRIKVLDINDNEPVFTQDVFVGSVEELSAAHTLVMKINATDADEPNTLNSKISYRIVSLEPAYPPVFYLNKDTGEIYTTSVTLDREEHSSYTLTVEARDGNGEVTDKPVKQAQVQIRILDVNDNIPVVENKVLEGMVEENQVNVEVTRIKVFDADEIGSDNWLANFTFASGNEGGYFHIETDAQTNEGIVTLIKEVDYEEMKNLDFSVIVANKAAFHKSIRSKYKPTPIPIKVKVKNVKEGIHFKSSVISIYVSESMDRSSKGQIIGNFQAFDEDTGLPAHARYVKLEDRDNWISVDSVTSEIKLAKLPDFESRYVQNGTYTVKIVAISEDYPRKTITGTVLINVEDINDNCPTLIEPVQTICHDAEYVNVTAEDLDGHPNSGPFSFSVIDKPPGMAEKWKIARQESTSVLLQQSEKKLGRSEIQFLISDNQGFSCPEKQVLTLTVCECLHGSGCREAQHDSYVGLGPAAIALMILAFLLLLLVPLLLLMCHCGKGAKGFTPIPGTIEMLHPWNNEGAPPEDKVVPSFLPVDQGGSLVGRNGVGGMAKEATMKGSSSASIVKGQHEMSEMDGRWEEHRSLLSGRATQFTGATGAIMTTETTKTARATGASRDMAGAQAAAVALNEEFLRNYFTDKAASYTEEDENHTAKDCLLVYSQEETESLNASIGCCSFIEGELDDRFLDDLGLKFKTLAEVCLGQKIDINKEIEQRQKPATETSMNTASHSLCEQTMVNSENTYSSGSSFPVPKSLQEANAEKVTQEIVTERSVSSRQAQKVATPLPDPMASRNVIATETSYVTGSTMPPTTVILGPSQPQSLIVTERVYAPASTLVDQPYANEGTVVVTERVIQPHGGGSNPLEGTQHLQDVPYVMVRERESFLAPSSGVQPTLAMPNIAVGQNVTVTERVLAPASTLQSSYQIPTENSMTARNTTVSGAGVPGPLPDFGLEESGHSNSTITTSSTRVTKHSTVQHSYS

SEQ ID NO: 416 - protein, 1711 aa, Homo sapiens
MSAKVRLKKLEQLLLDGPWRNESALSVETLLDVLVCLYTECSHSALRRDKYVAEFLEWAKPFTQLVKEMQLHREDFEIIKVIGRGAFGEVAVVKMKNTERIYAMKILNKWEMLKRAETACFREERDVLVNGDCQWITALHYAFQDENHLYLVMDYYVGGDLLTLLSKFEDKLPEDMARFYIGEMVLAIDSIHQLHYVHRDIKPDNVLLDVNGHIRLADFGSCLKMNDDGTVQSSVAVGTPDYISPEILQAMEDGMGKYGPECDWWSLGVCMYEMLYGETPFYAESLVETYGKIMNHEERFQFPSHVTDVSEEAKDLIQRLICSRERRLGQNGIEDFKKHAFFEGLNWENIRNLEAPYIPDVSSPSDTSNFDVDDDVLRNTEILPPGSHTGFSGLHLPFIGFTFTTESCFSDRGSLKSIMQSNTLTKDEDVQRDLEHSLQMEAYERRIRRLEQEKLELSRKLQESTQTVQSLHGSSRALSNSNRDKEIKKLNEEIERLKNKIADSNRLERQLEDTVALRQEREDSTQRLRGLEKQHRVVRQEKEELHKQLVEASERLKSQAKELKDAHQQRKLALQEFSELNERMAELRAQKQKVSRQLRDKEEEMEVATQKVDAMRQEMRRAEKLRKELEAQLDDAVAEASKERKLREHSENFCKQMESELEALKVKQGGRGAGATLEHQQEISKIKSELEKKVLFYEEELVRREASHVLEVKNVKKEVHDSESHQLALQKEILMLKDKLEKSKRERHNEMEEAVGTIKDKYERERAMLFDENKKLTAENEKLCSFVDKLTAQNRQLEDELQDLAAKKESVAHWEAQIAEIIQWVSDEKDARGYLQALASKMTEELEALRSSSLGSRTLDPLWKVRRSQKLDMSARLELQSALEAEIRAKQLVQEELRKVKDANLTLESKLKDSEAKNRELLEEMEILKKKMEEKFRADTGLKLPDFQDSIFEYFNTAPLAHDLTFRTSSASEQETQAPKPEASPSMSVAASEQQEDMARPPQRPSAVPLPTTQALALAGPKPKAHQFSIKSFSSPTQCSHCTSLMVGLIRQGYACEVCSFACHVSCKDGAPQVCPIPPEQSKRPLGVDVQRGIGTAYKGHVKVPKPTGVKKGWQRAYAVVCDCKLFLYDLPEGKSTQPGVIASQVLDLRDDEFSVSSVLASDVIHATRRDIPCIFRVTASLLGAPSKTSSLLILTENENEKRKWVGILEGLQSILHKNRLRNQVVHVPLEAYDSSLPLIKAILTAAIVDADRIAVGLEEGLYVIEVTRDVIVRAADCKKVHQIELAPREKIVILLCGRNHHVHLYPWSSLDGAEGSFDIKLPETKGCQLMATATLKRNSGTCLFVAVKRLILCYEIQRTKPFHRKFNEIVAPGSVQCLAVLRDRLCVGYPSGFCLLSIQGDGQPLNLVNPNDPSLAFLSQQSFDALCAVELESEEYLLCFSHMGLYVDPQGRRARAQELMWPAAPVACSCSPTHVTVYSEYGVDVFDVRTMEWVQTIGLRRIRPLNSEGTLNLLNCEPPRLIYFKSKFSGAVLNVPDTSDNSKKQMLRTRSKRRFVFKVPEEERLQQRREMLRDPELRSKMISNPTNFNHVAHMGPGDGMQVLMDLPLSAVPPSQEERPGPAPTNLARQPPSRNKPYISWPSSGGSEPSVTVPLRSMSDPDQDFDKEPDSDSTKHSTPSNSSNPSGPPSPNSPHRSQLPLEGLEQPACDT

SEQ ID NO: 417 - protein, 1596 aa, Homo sapiens
MESRETLSSSRQRGGESDFLPVSSAKPPAAPGCAGEPLLSTPGPGKGIPVGGERMEPEEEDELGSGRDVDSNSNADSEKWVAGDGLEEQEFSIKEANFTEGSLKLKIQTTKRAKKPPKNLENYICPPEIKITIKQSGDQKVSRAGKNSKATKEEERSHSKKKLLTASDLAASDLKGFQPQAYERPQKHSTLHYDTGLPQDFTGDTLKPKHQQKSSSQNHMDWSTNSDSGPVTQNCFISPESGRETASTSKIPALEPVASFAKAQGKKGSAGNTWSQLSNNNKDLLLGGVAPSPSSHSSPAPPSSSAECNGLQPLVDQDGGGTKEPPEPPTVGSKKKSSKKDVISQTIPNPDLDWVKNAQKAFDNTEGKREGYSADSAQEASPARQNVSSASNPENDSSHVRITIPIKAPSLDPTNHKRKKRQSIKAVVEKIMPEKALASGITMSSEVVNRILSNSEGNKKDPRVPKLSKMIENESPSVGLETGGNAEKVIPGGVSKPRKPPMVMTPPTCTDHSPSRKLPEIQHPKFAAKRRWTCSKPKPSTMLREAVMATSDKLMLEPPSAYPITPSSPLYTNTDSLTVITPVKKKRGRPKKQPLLTVETIHEGTSTSPVSPISREFPGTKKRKRRRNLAKLAQLVPGEDKPMSEMKFHKKVGKLGVLDKKTIKTINKMKTLKRKNILNQILSCSSSVALKAKAPPETSPGAAAIESKLGKQINVSKRGTIYIGKKRGRKPRAELPPPSEEPKTAIKHPRPVSSQPDVPAVPSNFQSLVASSPAAMHPLSTQLGGSNGNLSPASTETNFSELKTMPNLQPISALPTKTQKGIHSGTWKLSPPRLMANSPSHLCEIGSLKEITLSPVSESHSEETIPSDSGIGTDNNSTSDQAEKSSESRRRYSFDFCSLDNPEAIPSDTSTKNRHGHRQKHLIVDNFLAHESLKKPKHKRKRKSLQNRDDLQFLADLEELITKFQVFRISHRSYTFYHENPYPSIFRINFDHYYPVPYIQYDPLLYLRRTSDLKSKKKRGRPAKTNDTMTKVPFLQGFSYPIPSGSYYAPYGMPYTSMPMMNLGYYGQYPAPLYLSHTLGAASPFMRPTVPPPQFHTNSHVKMSGAAKHKAKHGVHLQGPVSMGLGDMQPSLNPPKVGSASLSSGRLHKRKHKHKHKHKEDRILGTHDNLSGLFAGKATGFSSHILSERLSSADKELPLVSEKNKHKEKQKHQHSEAGHKASKNNFEVDTLSTLSLSDAQHWTQAKEKGDLSSEPVDSCTKRYSGSGGDGGSTRSENLDVFSEMNPSNDKWDSDVSGSKRRSYEGFGTYREKDIQAFKMNRKERSSYDSSMSPGMPSPHLKVDQTAVHSKNEGSVPTMMTRKKPAAVDSVTIPPAPVLSLLAASAATSDAVGSSLKKRFKRREIEAIQCEVRKMCNYTKILSTKKNLDHVNKILKAKRLQRQSKTGNNFVKKRRGRPRKQPTQFDEDSRDQMPVLEKCIDLPSKRGQKPSLSPLVLEPAASQDTIMATIEAVIHMAREAPPLPPPPPPPLPPPPPPPLPPPPPLPKTPRGGKRKHKPQAPAQPPQQSPPQQPLPQEEEVKAKRQRKSRGSESEVLP

SEQ ID NO: 418 - protein, 1938 aa, Homo sapiens
MSSDAEMAIFGEAAPYLRKPEKERIEAQNRPFDSKKACFVADNKEMYVKGMIQTRENDKVIVKTLDDRMLTLNNDQVFPMNPPKFDKIEDMAMMTHLHEPAVLYNLKERYAAWMIYTYSGLFCVTVNPYKWLPVYKPEVVAAYRGKKRQEAPPHIFSISDNAYQFMLTDRDNQSILITGESGAGKTVNTKRVIQYFATIAVTGDKKKETQPGKMQGTLEDQIIQANPLLEAFGNAKTVRNDNSSRFGKFIRIHFGATGKLASADIETYLLEKSRVTFQLSSERSYHIFYQIMSNKKPELIDLLLISTNPFDFPFVSQGEVTVASIDDSEELLATDNAIDILGFSSEEKVGIYKLTGAVMHYGNMKFKQKQREEQAEPDGTEVADKAGYLMGLNSAEMLKGLCCPRVKVGNEYVTKGQNVQQVTNSVGALAKAVYEKMFLWMVTRINQQLDTKQPRQYFIGVLDIAGFEIFDFNSLEQLCINFTNEKLQQFFNHHMFVLEQEEYKKEGIEWEFIDFGMDLAACIELIEKPMGIFSILEEECMFPKATDTSFKNKLYDQHLGKSNNFQKPKPAKGKAEAHFSLVHYAGTVDYNIAGWLDKNKDPLNETVVGLYQKSSLKLLSFLFSNYAGAETGDSGGSKKGGKKKGSSFQTVSAVFRENLNKLMTNLRSTHPHFVRCLIPNETKTPGVMDHYLVMHQLRCNGVLEGIRICRKGFPSRILYADFKQRYRILNASAIPEGQFIDSKNASEKLLNSIDVDREQFRFGNTKVFFKAGLLGLLEEMRDEKLVTLMTSTQAVCRGYLMRVEFKKMMERRDSIFCIQYNIRSFMNVKHWPWMNLFFKIKPLLKSAEAEKEMATMKEDFERTKEELARSEARRKELEEKMVSLLQEKNDLQLQVQSETENLMDAEERCEGLIKSKILLEAKVKELTERLEEEEEMNSELVAKKRNLEDKCSSLKRDIDDLELTLTKVEKEKHATENKVKNLSEEMTALEENISKLTKEKKSLQEAHQQTLDDLQVEEDKVNGLIKINAKLEQQTDDLEGSLEQEKKLRADLERAKRKLEGDLKMSQESIMDLENDKQQIEEKLKKKEFELSQLQAKIDDEQVHSLQFQKKIKELQARIEELEEEIEAEHTLRAKIEKQRSDLARELEEISERLEEASGATSAQIEMNKKREAEFQKMRRDLEEATLQHEATAATLRKKQADSVAELGEQIDNLQRVKQKLEKEKSELKMEIDDMASNIEALSKSKSNIERTCRTVEDQFSEIKAKDEQQTQLIHDLNMQKARLQTQNGELSHRVEEKESLISQLTKSKQALTQQLEELKRQMEEETKAKNAMAHALQSSRHDCDLLREQYEEEQEAKAELQRALSKANSEVAQWRTKYETDAIQRTEELEEAKKKLAQRLQEAEENTETANSKCASLEKTKQRLQGEVEDLMRDLERSHTACATLDKKQRNFDKVLAEWKQKLDESQAELEAAQKESRSLSTELFKMRNAYEEVVDQLETLRRENKNLQEEISDLTEQIAETGKNLQEAEKTKKLVEQEKSDLQVALEEVEGSLEHEESKILRVQLELSQVKSELDRKVIEKDEEIEQLKRNSQRAAEALQSVLDAEIRSRNDALRLKKKMEGDLNEMEIQLGHSNRQMAETQKHLRTVQGQLKDSQLHLDDALRSNEDLKEQLAIVERRNGLLLEELEEMKVALEQTERTRRLSEQELLDASDRVQLLHSQNTSLINTKKKLEADIAQCQAEVENSIQESRNAEEKAKKAITDAAMMAEELKKEQDTSAHLERMKKNLEQTVKDLQHRLDEAEQLALKGGKKQIQKLENRVRELENELDVEQKRGAEALKGAHKYERKVKEMTYQAEEDHKNILRLQDLVDKLQAKVKSYKRQAEEAEEQANTQLSRCRRVQHELEEAAERADIAESQVNKLRAKSRDVGSQKMEE

SEQ ID NO: 419 - protein, 1427 aa, Homo sapiens
MASWGGEKRGGAEGSPKPAVYATRKTPSVGSQGDQWYLGYPGDQWSSGFPYSWWKNSVGSESKHGEGALDQPQHDVRLEDLGELHRAARSGDVPGVEHILAPGDTGVDKRDRKKSIQQLVPEYKEKQTPESLPQNNNPDWHPTNLTLSDETCQRSKNLKVDDKCPSVSPSMPENQSATKELGQMNLTEREKMDTGVVLLSGNDTLHDLCQSQLPENKESKEAEQDSELTSEEEQERLKGCENKQPQKTSQEPEMAKDCDREDIPIYPVLPHVQKSEEMWIEQGKLEWKNQLKLVINELKQRFGEIYEKYKIPACPEEEPLLDNSTRGTDVKDIPFNLTNNIPGCEEEDASEISVSVVFETFPEQKEPSLKNIIHPYYHPYSGSQEHVCQSSSKFHLHENKLDCDNDNKPGIGHIFSTDKNFHNDASTKKARNPEVVMVEMKEDQEFDLQMTKNMNQNSDSGSTNNYKSLKPKLENLSSLPPDSDRTSEVYLHEELQQDMQKFKNEVNTLEEEFLALKKEDVQLHKDVEEEMEKHRSNSTELSGTLTDGTTVGNDDDGLNQQIPRKENGEHDRPADKTSNEKNEVKNQIYPEADFADSMEPSEIASEDCELSHSVYENFMLLIEQLRMEYKDSASLPRIQDTFCLCEHLLKLKNNHCDQLTVKLKQMENMVSVLQNELSETKKTKLQLELQKIEWEKELYDLRLALKQENEEKRNADMLYNKDSEQLRIKEEECGKVVETKQQLKWNLRRLVKELRTVRNNLDLVVQERNDAQKQLSEEQDARILQDQILTSKQKELEMARKKMNSEISHRHQKEKDLFHEDCMLQEEIALLRLEIDTIKNQNKQKEKKYFEDIEAVKEKNDNLQKIIKLNEETLTETILQYSGQLNNLTAENKILNSELENGKQNQERLEIEMESYRCRLAAAVRDCDQSQTARDLKLDFQRTRQEWVRLHDKMKVDMSGLQAKNEILSEKLSNAESKINSLQIQLHNTRDALGRESLILERVQRDLSQTQCQKKETEQMYQIEQSKLKKYIAKQESVEERLSQLQSENMLLRQQLDDAHKKANSQEKTSSTIQDQFHSAAKNLQAESEKQILSLQEKNKELMDEYNHLKERMDQCEKEKAGRKIDLTEAQETVPSRCLHLDAENEVLQLQQTLFSMKAIQKQCETLQKNKKQLKQEVVNLKSYMERNMLERGKAEWHKLLIEERARKEIEEKLNEAILTLQKQAAVSHEQLVQLREDNTTSIKTQMELTIKDLESEISRIKTSQADFNKTELERYKELYLEEVKVRESLSNELSRTNEMIAEVSTQLTVEKEQTRSRSLFTAYATRPVLESPCVGNLNDSEGLNRKHIPRKKRSALKDMESYLLKMQQKLQNDLTAEVAGSSQTGLHRIPQCSSFSSSSLHLLLCSICQPFFLILQLLLNMNLDPI

SEQ ID NO: 420 - protein, 1008 aa, Homo sapiens
MDTAEDPAWLQLLQKDSSPPGPRPTAFFCPQDGSLGAGSSAMRDYCPSQQKASPAPPRHTPDQSPGMESRHRSPSGAGEGASCSDGPRGSLACPSPTCFSPQESPSKETLEAHGASISGTPEATTSGKPEPVSSVKTEPKSSDDRNPMFLEKMDFKSSKQADSTSIGKEDPGSSRKADPMFTGKAEPEILGKGDPVAPGRMDPMTVRKEDLGSLGKVDPLCSSKTYTVSPRKEDPGSLRKVDPVSSDKVDPVFPRKEEPRYSGKEHPVSSEKVAPTSAEKVDLVLSGKRDPGPSGKADPMPLESMDSASTGKTEPGLLGKLIPGSSGKNGPVSSGTGAPGSLGRLDPTCLGMADPASVGNVETVPATKEDSRFLGKMDPASSGEGRPVSGHTDTTASAKTDLTSLKNVDPMSSGKVDPVSLGKMDPMCSGKPELLSPGQAERVSVGKAGTVSPGKEDPVSSRREDPISAGSRKTSSEKVNPESSGKTNPVSSGPGDPRSLGTAGPPSAVKAEPATGGKGDPLSSEKAGLVASGKAAPTASGKAEPLAVGKEDPVSKGKADAGPSGQGDSVSIGKVVSTPGKTVPVPSGKVDPVSLGKAEAIPEGKVGSLPLEKGSPVTTTKADPRASGKAQPQSGGKAETKLPGQEGAAAPGEAGAVCLKKETPQASEKVDPGSCRKAEPLASGKGEPVSLGKADSAPSRKTESPSLGKVVPLSLEKTKPSSSSRQLDRKALGSARSPEGARGSEGRVEPKAEPVSSTEASSLGQKDLEAAGAERSPCPEAAAPPPGPRTRDNFTKAPSWEASAPPPPREDAGTQAGAQACVSVAVSPMSPQDGAGGSAFSFQAAPRAPSPPSRRDAGLQVSLGAAETRSVATGPMTPQAAAPPAFPEVRVRPGSALAAAVAPPEPAEPVRDVSWDEKGMTWEVYGAAMEVEVLGMAIQKHLERQIEEHGRQGAPAPPPAARAGPGRSGSVRTAPPDGAAKRPPGLFRALLQSVRRPRCCSRAGPTAE

SEQ ID NO: 421 - protein, 2871 aa, Homo sapiens
MSCNGGSHPRINTLGRMIRAESGPDLRYEVTSGGGGTSRMYYSRRGVITDQNSDGYCQTGTMSRHQNQNTIQELLQNCSDCLMRAELIVQPELKYGDGIQLTRSRELDECFAQANDQMEILDSLIREMRQMGQPCDAYQKRLLQLQEQMRALYKAISVPRVRRASSKGGGGYTCQSGSGWDEFTKHVTSECLGWMRQQRAEMDMVAWGVDLASVEQHINSHRGIHNSIGDYRWQLDKIKADLREKSAIYQLEEEYENLLKASFERMDHLRQLQNIIQATSREIMWINDCEEEELLYDWSDKNTNIAQKQEAFSIRMSQLEVKEKELNKLKQESDQLVLNQHPASDKIEAYMDTLQTQWSWILQITKCIDVHLKENAAYFQFFEEAQSTEAYLKGLQDSIRKKYPCDKNMPLQHLLEQIKELEKEREKILEYKRQVQNLVNKSKKIVQLKPRNPDYRSNKPIILRALCDYKQDQKIVHKGDECILKDNNERSKWYVTGPGGVDMLVPSVGLIIPPPNPLAVDLSCKIEQYYEAILALWNQLYINMKSLVSWHYCMIDIEKIRAMTIAKLKTMRQEDYMKTIADLELHYQEFIRNSQGSEMFGDDDKRKIQSQFTDAQKHYQTLVIQLPGYPQHQTVTTTEITHHGTCQDVNHNKVIETNRENDKQETWMLMELQKIRRQIEHCEGRMTLKNLPLADQGSSHHITVKINELKSVQNDSQAIAEVLNQLKDMLANFRGSEKYCYLQNEVFGLFQKLENINGVTDGYLNSLCTVRALLQAILQTEDMLKVYEARLTEEETVCLDLDKVEAYRCGLKKIKNDLNLKKSLLATMKTELQKAQQIHSQTSQQYPLYDLDLGKFGEKVTQLTDRWQRIDKQIDFRLWDLEKQIKQLRNYRDNYQAFCKWLYDAKRRQDSLESMKFGDSNTVMRFLNEQKNLHSEISGKRDKSEEVQKIAELCANSIKDYELQLASYTSGLETLLNIPIKRTMIQSPSGVILQEAADVHARYIELLTRSGDYYRFLSEMLKSLEDLKLKNTKIEVLEEELRLARDANSENCNKNKFLDQNLQKYQAECSQFKAKLASLEELKRQAELDGKSAKQNLDKCYGQIKELNEKITRLTYEIEDEKRRRKSVEDRFDQQKNDYDQLQKARQCEKENLGWQKLESEKAIKEKEYEIERLRVLLQEEGTRKREYENELAKVRNHYNEEMSNLRNKYETEINITKTTIKEISMQKEDDSKNLRNQLDRLSRENRDLKDEIVRLNDSILQATEQRRRAEENALQQKACGSEIMQKKQHLEIELKQVMQQRSEDNARHKQSLEEAAKTIQDKNKEIERLKAEFQEEAKRRWEYENELSKVRNNYDEEIISLKNQFETEINITKTTIHQLTMQKEEDTSGYRAQIDNLTRENRSLSEEIKRLKNTLTQTTENLRRVEEDIQQQKATGSEVSQRKQQLEVELRQVTQMRTEESVRYKQSLDDAAKTIQDKNKEIERLKQLIDKETNDRKCLEDENARLQRVQYDLQKANSSATETINKLKVQEQELTRLRIDYERVSQERTVKDQDITRFQNSLKELQLQKQKVEEELNRLKRTASEDSCKRKKLEEELEGMRRSLKEQAIKITNLTQQLEQASIVKKRSEDDLRQQRDVLDGHLREKQRTQEELRRLSSEVEALRRQLLQEQESVKQAHLRNEHFQKAIEDKSRSLNESKIEIERLQSLTENLTKEHLMLEEELRNLRLEYDDLRRGRSEADSDKNATILELRSQLQISNNRTLELQGLINDLQRERENLRQEIEKFQKQALEASNRIQESKNQCTQVVQERESLLVKIKVLEQDKARLQRLEDELNRAKSTLEAETRVKQRLECEKQQIQNDLNQWKTQYSRKEEAIRKIESEREKSEREKNSLRSEIERLQAEIKRIEERCRRKLEDSTRETQSQLETERSRYQREIDKLRQRPYGSHRETQTECEWTVDTSKLVFDGLRKKVTAMQLYECQLIDKTTLDKLLKGKKSVEEVASEIQPFLRGAGSIAGASASPKEKYSLVEAKRKKLISPESTVMLLEAQAATGGIIDPHRNEKLTVDSAIARDLIDFDDRQQIYAAEKAITGFDDPFSGKTVSVSEAIKKNLIDRETGMRLLEAQIASGGVVDPVNSVFLPKDVALARGLIDRDLYRSLNDPRDSQKNFVDPVTKKKVSYVQLKERCRIEPHTGLLLLSVQKRSMSFQGIRQPVTVTELVDSGILRPSTVNELESGQISYDEVGERIKDFLQGSSCIAGIYNETTKQKLGIYEAMKIGLVRPGTALELLEAQAATGFIVDPVSNLRLPVEEAYKRGLVGIEFKEKLLSAERAVTGYNDPETGNIISLFQAMNKELIEKGHGIRLLEAQIATGGIIDPKESHRLPVDIAYKRGYFNEELSEILSDPSDDTKGFFDPNTEENLTYLQLKERCIKDEETGLCLLPLKEKKKQVQTSQKNTLRKRRVVIVDPETNKEMSVQEAYKKGLIDYETFKELCEQECEWEEITITGSDGSTRVVLVDRKTGSQYDIQDAIDKGLVDRKFFDQYRSGSLSLTQFADMISLKNGVGTSSSMGSGVSDDVFSSSRHESVSKISTISSVRNLTIRSSSFSDTLEESSPIAAIFDTENLEKISITEGIERGIVDSITGQRLLEAQACTGGIIHPTTGQKLSLQDAVSQGVIDQDMATRLKPAQKAFIGFEGVKGKKKMSAAEAVKEKWLPYEAGQRFLEFQYLTGGLVDPEVHGRISTEEAIRKGFIDGRAAQRLQDTSSYAKILTCPKTKLKISYKDAINRSMVEDITGLRLLEAASVSSKGLPSPYNMSSAPGSRSGSRSGSRSGSRSGSRSGSRRGSFDATGNSSYSYSYSFSSSSIGH

SEQ ID NO: 422 - protein, 1188 aa, Homo sapiens
MEPNSLQWVGSPCGLHGPYIFYKAFQFHLEGKPRILSLGDFFFVRCTPKDPICIAELQLLWEERTSRQLLSSSKLYFLPEDTPQGRNSDHGEDEVIAVSEKVIVKLEDLVKWVHSDFSKWRCGFHAGPVKTEALGRNGQKEALLKYRQSTLNSGLNFKDVLKEKADLGEDEEETNVIVLSYPQYCRYRSMLKRIQDKPSSILTDQFALALGGIAVVSRNPQILYCRDTFDHPTLIENESICDEFAPNLKGRPRKKKPCPQRRDSFSGVKDSNNNSDGKAVAKVKCEARSALTKPKNNHNCKKVSNEEKPKVAIGEECRADEQAFLVALYKYMKERKTPIERIPYLGFKQINLWTMFQAAQKLGGYETITARRQWKHIYDELGGNPGSTSAATCTRRHYERLILPYERFIKGEEDKPLPPIKPRKQENSSQENENKTKVSGTKRIKHEIPKSKKEKENAPKPQDAAEVSSEQEKEQETLISQKSIPEPLPAADMKKKIEGYQEFSAKPLASRVDPEKDNETDQGSNSEKVAEEAGEKGPTPPLPSAPLAPEKDSALVPGASKQPLTSPSALVDSKQESKLCCFTESPESEPQEASFPSFPTTQPPLANQNETEDDKLPAMADYIANCTVKVDQLGSDDIHNALKQTPKVLVVQSFDMFKDKDLTGPMNENHGLNYTPLLYSRGNPGIMSPLAKKKLLSQVSGASLSSSYPYGSPPPLISKKKLIARDDLCSSLSQTHHGQSTDHMAVSRPSVIQHVQSFRSKPSEERKTINDIFKHEKLSRSDPHRCSFSKHHLNPLADSYVLKQEIQEGKDKLLEKRALPHSHMPSFLADFYSSPHLHSLYRHTEHHLHNEQTSKYPSRDMYRESENSSFPSHRHQEKLHVNYLTSLHLQDKKSAAAEAPTDDQPTDLSLPKNPHKPTGKVLGLAHSTTGPQESKGISQFQVLGSQSRDCHPKACRVSPMTMSGPKKYPESLSRSGKPHHVRLENFRKMEGMVHPILHRKMSPQNIGAARPIKRSLEDLDLVIAGKKARAVSPLDPSKEVSGKEKASEQESEGSKAAHGGHSGGGSEGHKLPLSSPIFPGLYSGSLCNSGLNSRLPAGYSHSLQYLKNQTVLSPLMQPLAFHSLVMQRGIFTSPTNSQQLYRHLAAATPVGSSYGDLLHNSIYPLAAINPQAAFPSSQLSSVHPSTKL

SEQ ID NO: 423 - protein, 2047 aa, Homo sapiens
MAASERRAFAHKINRTVAAEVRKQVSRERSGSPHSSRRCSSSLGVPLTEVVEPLDFEDVLLSRPPDAEPGPLRDLVEFPADDLELLLQPRECRTTEPGIPKDEKLDAQVRAAVEMYIEDWVIVHRRYQYLSAAYSPVTTDTQRERQKGLPRQVFEQDASGDERSGPEDSNDSRRGSGSPEDTPRSSGASSIFDLRNLAADSLLPSLLERAAPEDVDRRNETLRRQHRPPALLTLYPAPDEDEAVERCSRPEPPREHFGQRILVKCLSLKFEIEIEPIFGILALYDVREKKKISENFYFDLNSDSMKGLLRAHGTHPAISTLARSAIFSVTYPSPDIFLVIKLEKVLQQGDISECCEPYMVLKEVDTAKNKEKLEKLRLAAEQFCTRLGRYRMPFAWTAVHLANIVSSAGQLDRDSDSEGERRPAWTDRRRRGPQDRASSGDDACSFSGFRPATLTVTNFFKQEAERLSDEDLFKFLADMRRPSSLLRRLRPVTAQLKIDISPAPENPHFCLSPELLHIKPYPDPRGRPTKEILEFPAREVYAPHTSYRNLLYVYPHSLNFSSRQGSVRNLAVRVQYMTGEDPSQALPVIFGKSSCSEFTREAFTPVVYHNKSPEFYEEFKLHLPACVTENHHLLFTFYHVSCQPRPGTALETPVGFTWIPLLQHGRLRTGPFCLPVSVDQPPPSYSVLTPDVALPGMRWVDGHKGVFSVELTAVSSVHPQDPYLDKFFTLVHVLEEGAFPFRLKDTVLSEGNVEQELRASLAALRLASPEPLVAFSHHVLDKLVRLVIRPPIISGQIVNLGRGAFEAMAHVVSLVHRSLEAAQDARGHCPQLAAYVHYAFRLPGTEPSLPDGAPPVTVQAATLARGSGRPASLYLARSKSISSSNPDLAVAPGSVDDEVSRILASKLLHEELALQWVVSSSAVREAILQHAWFFFQLMVKSMALHLLLGQRLDTPRKLRFPGRFLDDITALVGSVGLEVITRVHKDVELAEHLNASLAFFLSDLLSLVDRGFVFSLVRAHYKQVATRLQSSPNPAALLTLRMEFTRILCSHEHYVTLNLPCCPLSPPASPSPSVSSTTSQSSTFSSQAPDPKVTSMFELSGPFRQQHFLAGLLLTELALALEPEAEGAFLLHKKAISAVHSLLCGHDTDPRYAEATVKARVAELYLPLLSIARDTLPRLHDFAEGPGQRSRLASMLDSDTEGEGDIAGTINPSVAMAIAGGPLAPGSRASISQGPPTASRAGCALSAESSRTLLACVLWVLKNTEPALLQRWATDLTLPQLGRLLDLLYLCLAAFEYKGKKAFERINSLTFKKSLDMKARLEEAILGTIGARQEMVRRSRERSPFGNPENVRWRKSVTHWKQTSDRVDKTKDEMEHEALVEGNLATEASLVVLDTLEIIVQTVMLSEARESVLGAVLKVVLYSLGSAQSALFLQHGLATQRALVSKFPELLFEEDTELCADLCLRLLRHCGSRISTIRTHASASLYLLMRQNFEIGHNFARVKMQVTMSLSSLVGTTQNFSEEHLRRSLKTILTYAEEDMGLRDSTFAEQVQDLMFNLHMILTDTVKMKEHQEDPEMLIDLMYRIARGYQGSPDLRLTWLQNMAGKHAELGNHAEAAQCMVHAAALVAEYLALLEDHRHLPVGCVSFQNISSNVLEESAISDDILSPDEEGFCSGKHFTELGLVGLLEQAAGYFTMGGLYEAVNEVYKNLIPILEAHRDYKKLAAVHGKLQEAFTKIMHQSSGWERVFGTYFRVGFYGAHFGDLDEQEFVYKEPSITKLAEISHRLEEFYTERFGDDVVEIIKDSNPVDKSKLDSQKAYIQITYVEPYFDTYELKDRVTYFDRNYGLRTFLFCTPFTPDGRAHGELPEQHKRKTLLSTDHAFPYIKTRIRVCHREETVLTPVEVAIEDMQKKTRELAFATEQDPPDAKMLQMVLQGSVGPTVNQGPLEVAQVFLAEIPEDPKLFRHHNKLRLCFKDFCKKCEDALRKNKALIGPDQKEYHRELERNYCRLREALQPLLTQRLPQLMAPTPPGLRNSLNRASFRKADL

SEQ ID NO: 424 - protein, 1781 aa, Homo sapiens
MTTYRAIPSDGVDLAASCGARVGDVLPGPHTGDYAPLGFWAQNGSMSQPLGESPATATATATATTRPSPTTPAMPKMGVRARVADWPPKREALREHSNPSPSQDTDGTKATKMAHSMRSIQNGQPPTSTPASSGSKAFHRLSRRRSKDVEFQDGWPRSPGRAFLPLRHRSSSEITLSECDAEDAGEPRGARHTGALPLFREYGSTSSIDVQGMPEQSFFDILNEFRSEQPDARGCQALTELLRADPGPHLMGGGGGAKGDSHNGQPAKDSLLPLQPTKEKEKARKKPARGLGGGDTVDSSIFRKLRSSKPEGEAGRSPGEADEGRSPPEASRPWVCQKSFAHFDVQSMLFDLNEAAANRVSVSQRRNTTTGASAASAASAMASLTASRAHSLGGLDPAFTSTEDLNCKENLEQDLGDDNSNDLLLSCPHFRNEIGGECERNVSFSRASVGSPSSGEGHLAEPALSAYRTNASISVLEVPKEQQRTQSRPRQYSIEHVDLGARYYQDYFVGKEHANYFGVDEKLGPVAVSIKREKLEDHKEHGPQYQYRIIFRTRELITLRGSILEDATPTATKHGTGRGLPLKDALEYVIPELNIHCLRLALNTPKVTEQLLKLDEQGLCRKHKVGILYCKAGQSSEEEMYNNEEAGPAFEEFLSLIGEKVCLKGFTKYAAQLDVKTDSTGTHSLYTMYQDYEIMFHVSTLLPYTPNNRQQLLRKRHIGNDIVTIIFQEPGALPFTPKNIRSHFQHVFIIVRVHNPCTDNVCYSMAVTRSKDAPPFGPPIPSGTTFRKSDVFRDFLLAKVINAENAAHKSDKFHTMATRTRQEYLKDLAENCVSNTPIDSTGKFNLISLTSKKKEKTKARAGAEQHSAGAIAWRVVAQDYAQGVEIDCILGISNEFVVLLDLRTKEVVFNCYCGDVIGWTPDSSTLKIFYGRGDHIFLQATEGSVEDIREIVQRLKVMTSGWETVDMTLRRNGLGQLGFHVKYDGTVAEVEDYGFAWQAGLRQGSRLVEICKVAVVTLTHDQMIDLLRTSVTVKVVIIPPFEDGTPRRGWPETYDMNTSEPKTEQESITPGGRPPYRSNAPWQWSGPASHNSLPASKWATPTTPGHAQSLSRPLKQTPIVPFRESQPLHSKRPVSFPETPYTVSPAGADRVPPYRQPSGSFSTPGSATYVRYKPSPERYTAAPHPLLSLDPHFSHDGTSSGDSSSGGLTSQESTMERQKPEPLWHVPAQARLSAIAGSSGNKHPSRQDAAGKDSPNRHSKGEPQYSSHSSSNTLSSNASSSHSDDRWFDPLDPLEPEQDPLSKGGSSDSGIDTTLYTSSPSCMSLAKAPRPAKPHKPPGSMGLCGGGREAAGRSHHADRRREVSPAPAVAGQSKGYRPKLYSSGSSTPTGLAGGSRDPPRQPSDMGSRVGYPAQVYKTASAETPRPSQLAQPSPFQLSASVPKSFFSKQPVRNKHPTGWKRTEEPPPRPLPFSDPKKQVDTNTKNVFGQPRLRASLRDLRSPRKNYKSTIEDDLKKLIIMDNLGPEQERDTGQSPQKGLQRTLSDESLCSGRREPSFASPAGLEPGLPSDVLFTSTCAFPSSTLPARRQHQHPHPPVGPGATPAAGSGFPEKKSTISASELSLADGRDRPLRRLDPGLMPLPDTAAGLEWSSLVNAAKAYEVQRAVSLFSLNDPALSPDIPPAHSPVHSHLSLERGPPTPRTTPTMSEEPPLDLTGKVYQLEVMLKQLHTDLQKEKQDKVVLQSEVASLRQNNQRLQEESQAASEQLRKFAEIFCREKKEL

SEQ ID NO: 425 - protein, 1665 aa, Homo sapiens
MAQGRERDEGPHSAGGASLSVRWVQGFPKQNVHFVNDNTICYPCGNYVIFINIETKKKTVLQCSNGIVGVMATNIPCEVVAFSDRKLKPLIYVYSFPGLTRRTKLKGNILLDYTLLSFSYCGTYLASYSSLPEFELALWNWESSIILCKKSQPGMDVNQMSFNPMNWRQLCLSSPSTVSVWTIERSNQEHCFRARSVKLPLEDGSFFNETDVVFPQSLPKDLIYGPVLPLSAIAGLVGKEAETFRPKDDLYPLLHPTMHCWTPTSDLYIGCEEGHLLMINGDTLQVTVLNKIEEESPLDRRNFISPVTLVYQKEGVLASGIDGFVYSFIIKDRSYMIEDFLEIERPVEHMTFSPNYTVLLIQTDKGSVYIYTFGKEPTLNKVLDACDGKFQAIDFITPGTQYFMTLTYSGEICVWWLEDCACVSKIYLNTLATVLACCPSSLSAAVGTEDGSVYFISVYDKESPQVVHKAFLSESSVQHVVYDQQGIFLLVGTAEGKVFIINANSSSSFQIIGFTEVAKDILQISTVSLLETDIVEVMVLSSLPEAGRSRLEMFTLPTLLPQVSTTFADERGRLKDEIIHKYLYELEHALSSAVLGFQSNQIYGFCSQVPYICSYLLPEEEHTGIYILKPYKKVQSRQYGPGLLYLSSHGLWLITIAKCGILCIRDVYTLETFAWCRSHSHQGHGIQSMRISMDGQNILVNGRDDGTLVYLKWKRFGGHLASEILDYYQKLLISLSSAMDKENHYLSTTPKVSVDLGSDSEHTKQKASTDLSQDELVLTDVKKEIPWIQQKSQEAIKKEVNLFSKKRKEIKQGIKSLSKTILNMMEENDKLENIAKLDQQEFGLDLEELERLHDESQEEVAKMIKDVEMHNLAKSYLAELIKEECWNSMAVKGRALKCFHIPCVVENFPMKARTVEELKELERVLQQKKIEAECLKLRKEIVEAQSGVKLIKQRHEEDDEEEEEEDKTVKYSNLPNYLLGSLSTDFGVDTSLLSSQLELHSREEKINQIILLKDIIYKVKTVFNNEFDAAYKQKEFEIARVKERNVRIREIILDLELEEAVWQPEFEDCEKPERTLVVQDEEITAHKHIKPWHKAKELIVNHEKEHWLLIQDASTRLRALMDMMGGVLEVKKEDILRMVIPQPAFMAKPDAVWTEEERKQFKDYEKKVKELNEERDKYRKSLEAELKKLQNSIQESTQAFDEHLKRLFERRVKAEMVTNQEELKISNLAFSLLLDEELSSREKFLNNYLTRKQHEKSQTSEAVRKSREDLDVCKEHYDNLLAEDKVMDRSFKKEFSEIPGHQVDILYKLFKRRPRISKQKTHSETTSVVPFGELPGSGKLNKDAFAQLMKAMDELDNISNMPEGLDPLVWNHFCMTRRAKVENEQKVKQKAADLLEMATFLQKRVEEEEKVQQEIERVFHELILLQEEKVRFQLNLTIQILLKQGQVELENFQLVLEYSDAILINKNIIEDLNSVIRTQGQKKVASMMESKDVHKRILQIEWEHKKMEMEREDLNQKAWDIQMLFFSRDRQKYLNEPNYEALISIQIGIMEQTIAVLDKMHKKNVENCKKLLKKLGKFSNQKDIANYALSCNLREELVAVSERKDICNAMGSKLTCEKIVKERYENMMQQQKLTNISKQQAEQISILQTEVERLRMKTFPALVQM

SEQ ID NO: 426 - protein, 3230 aa, Homo sapiens
MQSSPSPAHPQLPVLQTQMVSDGMTGSNPVSPASSSSPASSGAGGISPQHIAQDSSLDGPPGPPDGATVPLEGFSLSQAADLANKGPKWEKSHAEIAEQAKHEAEIETRIAELRKEGFWSLKRLPKVPEPPRPKGHWDYLCEEMQWLSADFAQERRWKRGVARKVVRMVIRHHEEQRQKEERARREEQAKLRRIASTMAKDVRQFWSNVEKVVQFKQQSRLEEKRKKALDLHLDFIVGQTEKYSDLLSQSLNQPLTSSKAGSSPCLGSSSAASSPPPPASRLDDEDGDFQPQEDEEEDDEETIEVEEQQEGNDAEAQRREIELLRREGELPLEELLRSLPPQLLEGPSSPSQTPSSHDSDTRDGPEEGAEEEPPQVLEIKPPPSAVTQRNKQPWHPDEDDEEFTANEEEAEDEEDTIAAEEQLEGEVDHAMELSELAREGELSMEELLQQYAGAYAPGSGSSEDEDEDEVDANSSDCEPEGPVEAEEPPQEDSSSQSDSVEDRSEDEEDEHSEEEETSGSSASEESESEESEDAQSQSQADEEEEDDDFGVEYLLARDEEQSEADAGSGPPTPGPTTLGPKKEITDIAAAAESLQPKGYTLATTQVKTPIPLLLRGQLREYQHIGLDWLVTMYEKKLNGILADEMGLGKTIQTISLLAHLACEKGNWGPHLIIVPTSVMLNWEMELKRWCPSFKILTYYGAQKERKLKRQGWTKPNAFHVCITSYKLVLQDHQAFRRKNWRYLILDEAQNIKNFKSQRWQSLLNFNSQRRLLLTGTPLQNSLMELWSLMHFLMPHVFQSHREFKEWFSNPLTGMIEGSQEYNEGLVKRLHKVLRPFLLRRVKVDVEKQMPKKYEHVIRCRLSKRQRCLYDDFMAQTTTKETLATGHFMSVINILMQLRKVCNHPNLFDPRPVTSPFITPGICFSTASLVLRATDVHPLQRIDMGRFDLIGLEGRVSRYEADTFLPRHRLSRRVLLEVATAPDPPPRPKPVKMKVNRMLQPVPKQEGRTVVVVNNPRAPLGPVPVRPPPGPELSAQPTPGPVPQVLPASLMVSASPAGPPLIPASRPPGPVLLPPLQPNSGSLPQVLPSPLGVLSGTSRPPTPTLSLKPTPPAPVRLSPAPPPGSSSLLKPLTVPPGYTFPPAAATTTSTTTATATTTAVPAPTPAPQRLILSPDMQARLPSGEVVSIGQLASLAQRPVANAGGSKPLTFQIQGNKLTLTGAQVRQLAVGQPRPLQRNVVHLVSAGGQHHLISQPAHVALIQAVAPTPGPTPVSVLPSSTPSTTPAPTGLSLPLAANQVPPTMVNNTGVVKIVVRQAPRDGLTPVPPLAPAPRPPSSGLPAVLNPRPTLTPGRLPTPTLGTARAPMPTPTLVRPLLKLVHSPSPEVSASAPGAAPLTISSPLHVPSSLPGPASSPMPIPNSSPLASPVSSTVSVPLSSSLPISVPTTLPAPASAPLTIPISAPLTVSASGPALLTSVTPPLAPVVPAAPGPPSLAPSGASPSASALTLGLATAPSLSSSQTPGHPLLLAPTSSHVPGLNSTVAPACSPVLVPASALASPFPSAPNPAPAQASLLAPASSASQALATPLAPMAAPQTAILAPSPAPPLAPLPVLAPSPGAAPVLASSQTPVPVMAPSSTPGTSLASASPVPAPTPVLAPSSTQTMLPAPVPSPLPSPASTQTLALAPALAPTLGGSSPSQTLSLGTGNPQGPFPTQTLSLTPASSLVPTPAQTLSLAPGPPLGPTQTLSLAPAPPLAPASPVGPAPAHTLTLAPASSSASLLAPASVQTLTLSPAPVPTLGPAAAQTLALAPASTQSPASQASSLVVSASGAAPLPVTMVSRLPVSKDEPDTLTLRSGPPSPPSTATSFGGPRPRRQPPPPPRSPFYLDSLEEKRKRQRSERLERIFQLSEAHGALAPVYGTEVLDFCTLPQPVASPIGPRSPGPSHPTFWTYTEAAHRAVLFPQQRLDQLSEIIERFIFVMPPVEAPPPSLHACHPPPWLAPRQAAFQEQLASELWPRARPLHRIVCNMRTQFPDLRLIQYDCGKLQTLAVLLRQLKAEGHRVLIFTQMTRMLDVLEQFLTYHGHLYLRLDGSTRVEQRQALMERFNADKRIFCFILSTRSGGVGVNLTGADTVVFYDSDWNPTMDAQAQDRCHRIGQTRDVHIYRLISERTVEENILKKANQKRMLGDMAIEGGNFTTAYFKQQTIRELFDMPLEEPSSSSVPSAPEEEEETVASKQTHILEQALCRAEDEEDIRAATQAKAEQVAELAEFNENDGFPAGEGEEAGRPGAEDEEMSRAEQEIAALVEQLTPIERYAMKFLEASLEEVSREELKQAEEQVEAARKDLDQAKEEVFRLPQEEEEGPGAGDESSCGTGGGTHRRSKKAKAPERPGTRVSERLRGARAETQGANHTPVISAHQTRSTTTPPRCSPARERVPRPAPRPRPTPASAPAAIPALVPVPVSAPVPISAPNPITILPVHILPSPPPPSQIPPCSSPACTPPPACTPPPAHTPPPAQTCLVTPSSPLLLGPPSVPISASVTNLPLGLRPEAELCAQALASPESLELASVASSETSSLSLVPPKDLLPVAVEILPVSEKNLSLTPSAPSLTLEAGSIPNGQEQEAPDSAEGTTLTVLPEGEELPLCVSESNGLELPPSAASDEPLQEPLEADRTSEELTEAKTPTSSPEKPQELVTAEVAAPSTSSSATSSPEGPSPARPPRRRTSADVEIRGQGTGRPGQPPGPKVLRKLPGRLVTVVEEKELVRRRRQQRGAASTLVPGVSETSASPGSPSVRSMSGPESSPPIGGPCEAAPSSSLPTPPQQPFIARRHIELGVTGGGSPENGDGALLAITPPAVKRRRGRPPKKNRSPADAGRGVDEAPSSTLKGKTNGADPVPGPETLIVADPVLEPQLIPGPQPLGPQPVHRPNPLLSPVEKRRRGRPPKARDLPIPGTISSAGDGNSESRTQPPPHPSPLTPLPPLLVCPTATVANTVTTVTISTSPPKRKRGRPPKNPPSPRPSQLPVLDRDSTSVLESCGLGRRRQPQGQGESEGSSSDEDGSRPLTRLARLRLEAEGMRGRKSGGSMVVAVIQDDLDLADSGPGGLELTPPVVSLTPKLRSTRLRPGSLVPPLETEKLPRKRAGAPVGGSPGLAKRGRLQPPSPLGPEGSVEESEAEASGEEEEGDGTPRRRPGPRRLVGTTNQGDQRILRSSAPPSLAGPAVSHRGRKAKT

SEQ ID NO: 427 - protein, 2472 aa, Homo sapiens
MTARGQSPLAPLLETLEDPSASHGGQTDAYLTLTSRMTGEEGKEVITEIEKKLPRLYKVLKTHISSQNSELSSAALQALGFCLYNPKITSELSEANALELLSKLNDTIKNSDKNVRTRALWVISKQTFPSEVVGKMVSSIIDSLEILFNKGETHSAVVDFEALNVIVRLIEQAPIQMGEEAVRWAKLVIPLVVHSAQKVHLRGATALEMGMPLLLQKQQEIASITEQLMTTKLISELQKLFMSKNETYVLKLWPLFVKLLGRTLHRSGSFINSLLQLEELGFRSGAPMIKKIAFIAWKSLIDNFALNPDILCSAKRLKLLMQPLSSIHVRTETLALTKLEVWWYLLMRLGPHLPANFEQVCVPLIQSTISIDSNASPQGNSCHVATSPGLNPMTPVHKGASSPYGAPGTPRMNLSSNLGGMATIPSIQLLGLEMLLHFLLGPEALSFAKQNKLVLSLEPLEHPLISSPSFFSKHANTLITAVHDSFVAVGKDAPDVVVSAIWKELISLVKSVTESGNKKEKPGSEVLTLLLKSLESIVKSEVFPVSKTLVLMEITIKGLPQKVLGSPAYQVANMDILNGTPALFLIQLIFNNFLECGVSDERFFLSLESLVGCVLSGPTSPLAFSDSVLNVINQNAKQLENKEHLWKMWSVIVTPLTELINQTNEVNQGDALEHNFSAIYGALTLPVNHIFSEQRFPVATMKTLLRTWSELYRAFARCAALVATAEENLCCEELSSKIMSSLEDEGFSNLLFVDRIIYIITVMVDCIDFSPYNIKYQPKVKSPQRPSDWSKKKNEPLGKLTSLFKLIVKVIYSFHTLSFKEAHSDTLFTIGNSITGIISSVLGHISLPSMIRKIFATLTRPLALFYENSKLDEVPKVYSCLNNKLEKLLGEIIACLQFSYTGTYDSELLEQLSPLLCIIFLHKNKQIRKQSAQFWNATFAKVMMLVYPEELKPVLTQAKQKFLLLLPGLETVEMMEESSGPYSDGTENSQLNVKISGMERKSNGKRDSFLAQTKNKKENMKPAAKLKLESSSLKVKGEILLEEEKSTDFVFIPPEGKDAKERILTDHQKEVLKTKRCDIPAMYNNLDVSQDTLFTQYSQEEPMEIPTLTRKPKEDSKMMITEEQMDSDIVIPQDVTEDCGMAEHLEKSSLSNNECGSLDKTSPEMSNSNNDERKKALISSRKTSTECASSTENSFVVSSSSVSNTTVAGTPPYPTSRRQTFITLEKFDGSENRPFSPSPLNNISSTVTVKNNQETMIKTDFLPKAKQREGTFSKSDSEKIVNGTKRSSRRAGKAEQTGNKRSKPLMRSEPEKNTEESVEGIVVLENNPPGLLNQTECVSDNQVHLSESTMEHDNTKLKAATVENAVLLETNTVEEKNVEINLESKENTPPVVISADQMVNEDSQVQITPNQKTLRRSSRRRSEVVESTTESQDKENSHQKKERRKEEEKPLQKSPLHIKDDVLPKQKLIAEQTLQENLIEKGSNLHEKTLGETSANAETEQNKKKADPENIKSEGDGTQDIVDKSSEKLVRGRTRYQTRRASQGLLSSIENSESDSSEAKEEGSRKKRSGKWKNKSNESVDIQDQEEKVVKQECIKAENQSHDYKATSEEDVSIKSPICEKQDESNTVICQDSTVTSDLLQVPDDLPNVCEEKNETSKYAEYSFTSLPVPESNLRTRNAIKRLHKRDSFDNCSLGESSKIGISDISSLSEKTFQTLECQHKRSRRVRRSKGCDCCGEKSQPQEKSLIGLKNTENNDVEISETKKADVQAPVSPSETSQANPYSEGQFLDEHHSVNFHLGLKEDNDTINDSLIVSETKSKENTMQESLPSGIVNFREEICDMDSSEAMSLESQESPNENFKTVGPCLGDSKNVSQESLETKEEKPEETPKMELSLENVTVEGNACKVTESNLEKAKTMELNVGNEASFHGQERTKTGISEEAAIEENKRNDDSEADTAKLNAKEVATEEFNSDISLSDNTTPVKLNAQTEISEQTAAGELDGGNDVSDLHSSEETNTKMKNNEEMMIGEAMAETGHDGETENEGITTKTSKPDEAETNMLTAEMDNFVCDTVEMSTEEGIIDANKTETNTEYSKSEEKLDNNQMVMESDILQEDHHTSQKVEEPSQCLASGTAISELIIEDNNASPQKLRELDPSLVSANDSPSGMQTRCVWSPLASPSTSILKRGLKRSQEDEISSPVNKVRRVSFADPIYQAGLADDIDRRCSIVRSHSSNSSPIGKSVKTSPTTQSKHNTTSAKGFLSPGSRSPKFKSSKKCLISEMAKESIPCPTESVYPPLVNCVAPVDIILPQITSNMWARGLGQLIRAKNIKTIGDLSTLTASEIKTLPIRSPKVSNVKKALRIYHEQQVKTRGLEEIPVFDISEKTVNGIENKSLSPDEERLVSDIIDPVALEIPLSKNLLAQISALALQLDSEDLHNYSGSQLFEMHEKLSCMANSVIKNLQSRWRSPSHENSI

SEQ ID NO: 428 - protein, 2353 aa, Homo sapiens
MTEGARAADEVRVPLGAPPPGPAALVGASPESPGAPGREAERGSELGVSPSESPAAERGAELGADEEQRVPYPALAATVFFCLGQTTRPRSWCLRLVCNPWFEHVSMLVIMLNCVTLGMFRPCEDVECGSERCNILEAFDAFIFAFFAVEMVIKMVALGLFGQKCYLGDTWNRLDFFIVVAGMMEYSLDGHNVSLSAIRTVRVLRPLRAINRVPSMRILVTLLLDTLPMLGNVLLLCFFVFFIFGIVGVQLWAGLLRNRCFLDSAFVRNNNLTFLRPYYQTEEGEENPFICSSRRDNGMQKCSHIPGRRELRMPCTLGWEAYTQPQAEGVGAARNACINWNQYYNVCRSGDSNPHNGAINFDNIGYAWIAIFQVITLEGWVDIMYYVMDAHSFYNFIYFILLIIVGSFFMINLCLVVIATQFSETKQRESQLMREQRARHLSNDSTLASFSEPGSCYEELLKYVGHIFRKVKRRSLRLYARWQSRWRKKVDPSAVQGQGPGHRQRRAGRHTASVHHLVYHHHHHHHHHYHFSHGSPRRPGPEPGACDTRLVRAGAPPSPPSPGRGPPDAESVHSIYHADCHIEGPQERARVAHAAATAAASLRLATGLGTMNYPTILPSGVGSGKGSTSPGPKGKWAGGPPGTGGHGPLSLNSPDPYEKIPHVVGEHGLGQAPGHLSGLSVPCPLPSPPAGTLTCELKSCPYCTRALEDPEGELSGSESGDSDGRGVYEFTQDVRHGDRWDPTRPPRATDTPGPGPGSPQRRAQQRAAPGEPGWMGRLWVTFSGKLRRIVDSKYFSRGIMMAILVNTLSMGVEYHEQPEELTNALEISNIVFTSMFALEMLLKLLACGPLGYIRNPYNIFDGIIVVISVWEIVGQADGGLSVLRTFRLLRVLKLVRFLPALRRQLVVLVKTMDNVATFCTLLMLFIFIFSILGMHLFGCKFSLKTDTGDTVPDRKNFDSLLWAIVTVFQILTQEDWNVVLYNGMASTSSWAALYFVALMTFGNYVLFNLLVAILVEGFQAEGDANRSDTDEDKTSVHFEEDFHKLRELQTTELKMCSLAVTPNGHLEGRGSLSPPLIMCTAATPMPTPKSSPFLDAAPSLPDSRRGSSSSGDPPLGDQKPPASLRSSPCAPWGPSGAWSSRRSSWSSLGRAPSLKRRGQCGERESLLSGEGKGSTDDEAEDGRAAPGPRATPLRRAESLDPRPLRPAALPPTKCRDRDGQVVALPSDFFLRIDSHREDAAELDDDSEDSCCLRLHKVLEPYKPQWCRSREAWALYLFSPQNRFRVSCQKVITHKMFDHVVLVFIFLNCVTIALERPDIDPGSTERVFLSVSNYIFTAIFVAEMMVKVVALGLLSGEHAYLQSSWNLLDGLLVLVSLVDIVVAMASAGGAKILGVLRVLRLLRTLRPLRVISRAPGLKLVVETLISSLRPIGNIVLICCAFFIIFGILGVQLFKGKFYYCEGPDTRNISTKAQCRAAHYRWVRRKYNFDNLGQALMSLFVLSSKDGWVNIMYDGLDAVGVDQQPVQNHNPWMLLYFISFLLIVSFFVLNMFVGVVVENFHKCRQHQEAEEARRREEKRLRRLERRRRSTFPSPEAQRRPYYADYSPTRRSIHSLCTSHYLDLFITFIICVNVITMSMEHYNQPKSLDEALKYCNYVFTIVFVFEAALKLVAFGFRRFFKDRWNQLDLAIVLLSLMGITLEEIEMSAALPINPTIIRIMRVLRIARVLKLLKMATGMRALLDTVVQALPQVGNLGLLFMLLFFIYAALGVELFGRLECSEDNPCEGLSRHATFSNFGMAFLTLFRVSTGDNWNGIMKDTLRECSREDKHCLSYLPALSPVYFVTFVLVAQFVLVNVVVAVLMKHLEESNKEAREDAELDAEIELEMAQGPGSARRVDADRPPLPQESPGARDAPNLVARKVSVSRMLSLPNDSYMFRPVVPASAPHPRPLQEVEMETYGAGTPLGSVASVHSPPAESCASLQIPLAVSSPARSGEPLHALSPRGTARSPSLSRLLCRQEAVHTDSLEGKIDSPRDTLDPAEPGEKTPVRPVTQGGSLQSPPRSPRPASVRTRKHTFGQRCVSSRPAAPGGEEAEASDPADEEVSHITSSACPWQPTAEPHGPEASPVAGGERDLRRLYSVDAQGFLDKPGRADEQWRPSAELGSGEPGEAKAWGPEAEPALGARRKKKMSPPCISVEPPAEDEGSARPSAAEGGSTTLRRRTPSCEATPHRDSLEPTEGSGAGGDPAAKGERWGQASCRAEHLTVPSFAFEPLDLGVPSGDPFLDGSHSVTPESRASSSGAIVPLEPPESEPPMPVGDPPEKRRGLYLTVPQCPLEKPGSPSATPAPGGGADDPV

SEQ ID NO: 429 - protein, 2133 aa, Homo sapiens
MDEVEQDQHEARLKELFDSFDTTGTGSLGQEELTDLCHMLSLEEVAPVLQQTLLQDNLLGRVHFDQFKEALILILSRTLSNEEHFQEPDCSLEAQPKYVRGGKRYGRRSLPEFQESVEEFPEVTVIEPLDEEARPSHIPAGDCSEHWKTQRSEEYEAEGQLRFWNPDDLNASQSGSSPPQDWIEEKLQEVCEDLGITRDGHLNRKKLVSICEQYGLQNVDGEMLEEVFHNLDPDGTMSVEDFFYGLFKNGKSLTPSASTPYRQLKRHLSMQSFDESGRRTTTSSAMTSTIGFRVFSCLDDGMGHASVERILDTWQEEGIENSQEILKALDFSLDGNINLTELTLALENELLVTKNSIHQAALASFKAEIRHLLERVDQVVREKEKLRSDLDKAEKLKSLMASEVDDHHAAIERRNEYNLRKLDEEYKERIAALKNELRKEREQILQQAGKQRLELEQEIEKAKTEENYIRDRLALSLKENSRLENELLENAEKLAEYENLTNKLQRNLENVLAEKFGDLDPSSAEFFLQEERLTQMRNEYERQCRVLQDQVDELQSELEEYRAQGRVLRLPLKNSPSEEVEANSGGIEPEHGLGSEECNPLNMSIEAELVIEQMKEQHHRDICCLRLELEDKVRHYEKQLDETVVSCKKAQENMKQRHENETHTLEKQISDLKNEIAELQGQAAVLKEAHHEATCRHEEEKKQLQVKLEEEKTHLQEKLRLQHEMELKARLTQAQASFEREREGLQSSAWTEEKVRGLTQELEQFHQEQLTSLVEKHTLEKEELRKELLEKHQRELQEGREKMETECNRRTSQIEAQFQSDCQKVTERCESALQSLEGRYRQELKDLQEQQREEKSQWEFEKDELTQECAEAQELLKETLKREKTTSLVLTQEREMLEKTYKEHLNSMVVERQQLLQDLEDLRNVSETQQSLLSDQILELKSSHKRELREREEVLCQAGASEQLASQRLERLEMEHDQERQEMMSKLLAMENIHKATCETADRERAEMSTEISRLQSKIKEMQQATSPLSMLQSGCQVIGEEEVEGDGALSLLQQGEQLLEENGDVLLSLQRAHEQAVKENVKMATEISRLQQRLQKLEPGLVMSSCLDEPATEFFGNTAEQTEPFLQQNRTKQVEGVTRRHVLSDLEDDEVRDLGSTGTSSVQRQEVKIEESEASVEGFSELENSEETRTESWELKNQISQLQEQLMMLCADCDRASEKKQDLLFDVSVLKKKLKMLERIPEASPKYKLLYEDVSRENDCLQEELRMMETRYDEALENNKELTAEVFRLQDELKKMEEVTETFLSLEKSYDEVKIENEELNVLVLRLQGKIEKLQESVVQRCDCCLWEASLENLEIEPDGNILQLNQTLEECVPRVRSVHHVIEECKQENQYLEGNTQLLEKVKAHEIAWLHGTIQTHQERPRVQNQVILEENTTLLGFQDKHFQHQATIAELELEKTKLQELTRKLKERVTILVKQKDVLSHGEKEEELKAMMHDLQITCSEMQQKVELLRYESEKLQQENSILRNEITTLNEEDSISNLKLGTLNGSQEEMWQKTETVKQENAAVQKMVENLKKQISELKIKNQQLDLENTELSQKNSQNQEKLQELNQRLTEMLCQKEKEPGNSALEEREQEKFNLKEELERCKVQSSTLVSSLEAELSEVKIQTHIVQQENHLLKDELEKMKQLHRCPDLSDFQQKISSVLSYNEKLLKEKEALSEELNSCVDKLAKSSLLEHRIATMKQEQKSWEHQSASLKSQLVASQEKVQNLEDTVQNVNLQMSRMKSDLRVTQQEKEALKQEVMSLHKQLQNAGGKSWAPEIATHPSGLHNQQKRLSWDKLDHLMNEEQQLLWQENERLQTMVQNTKAELTHSREKVRQLESNLLPKHQKHLNPSGTMNPTEQEKLSLKRECDQFQKEQSPANRKVSQMNSLEQELETIHLENEGLKKKQVKLDEQLMEMQHLRSTATPSPSPHAWDLQLLQQQACPMVPREQFLQLQRQLLQAERINQHLQEELENRTSETNTPQGNQEQLVTVMEERMIEVEQKLKLVKRLLQEKVNQLKEQLCKNTKADAMVKDLYVENAQLLKALEVTEQRQKTAEKKNYLLEEKIASLSNIVRNLTPAPLTSTPPLRS

SEQ ID NO: 430 - protein, 2765 aa, Homo sapiens
MDVKDRRHRSLTRGRCGKECRYTSSSLDSEDCRVPTQKSYSSSETLKAYDHDSRMHYGNRVTDLIHRESDEFPRQGTNFTLAELGICEPSPHRSGYCSDMGILHQGYSLSTGSDADSDTEGGMSPEHAIRLWGRGIKSRRSSGLSSRENSALTLTDSDNENKSDDENGRPIPPTSSPSLLPSAQLPSSHNPPPVSCQMPLLDSNTSHQIMDTNPDEEFSPNSYLLRACSGPQQASSSGPPNHHSQSTLRPPLPPPHNHTLSHHHSSANSLNRNSLTNRRSQIHAPAPAPNDLATTPESVQLQDSWVLNSNVPLETRHFLFKTSSGSTPLFSSSSPGYPLTSGTVYTPPPRLLPRNTFSRKAFKLKKPSKYCSWKCAALSAIAAALLLAILLAYFIAMHLLGLNWQLQPADGHTFNNGIRTGLPGNDDVATMPSGGKVPWSLKNSSIDSGEAEVGRRVTQEVPPGVFWRSQIHISQPQFLKFNISLGKDALFGVYIRRGLPPSHAQYDFMERLDGKEKWSVVESPRERRSIQTLVQNEAVFVQYLDVGLWHLAFYNDGKDKEMVSFNTVVLDSVQDCPRNCHGNGECVSGVCHCFPGFLGADCAKAACPVLCSGNGQYSKGTCQCYSGWKGAECDVPMNQCIDPSCGGHGSCIDGNCVCSAGYKGEHCEEVDCLDPTCSSHGVCVNGECLCSPGWGGLNCELARVQCPDQCSGHGTYLPDTGLCSCDPNWMGPDCSVEVCSVDCGTHGVCIGGACRCEEGWTGAACDQRVCHPRCIEHGTCKDGKCECREGWNGEHCTIDGCPDLCNGNGRCTLGQNSWQCVCQTGWRGPGCNVAMETSCADNKDNEGDGLVDCLDPDCCLQSACQNSLLCRGSRDPLDIIQQGQTDWPAVKSFYDRIKLLAGKDSTHIIPGENPFNSSLVSLIRGQVVTTDGTPLVGVNVSFVKYPKYGYTITRQDGTFDLIANGGASLTLHFERAPFMSQERTVWLPWNSFYAMDTLVMKTEENSIPSCDLSGFVRPDPIIISSPLSTFFSAAPGQNPIVPETQVLHEEIELPGSNVKLRYLSSRTAGYKSLLKITMTQSTVPLNLIRVHLMVAVEGHLFQKSFQASPNLAYTFIWDKTDAYGQRVYGLSDAVVSVGFEYETCPSLILWEKRTALLQGFELDPSNLGGWSLDKHHILNVKSGILHKGTGENQFLTQQPAIITSIMGNGRRRSISCPSCNGLAEGNKLLAPVALAVGIDGSLYVGDFNYIRRIFPSRNVTSILELRNKEFKHSNNPAHKYYLAVDPVSGSLYVSDTNSRRIYRVKSLSGTKDLAGNSEVVAGTGEQCLPFDEARCGDGGKAIDATLMSPRGIAVDKNGLMYFVDATMIRKVDQNGIISTLLGSNDLTAVRPLSCDSSMDVAQVRLEWPTDLAVNPMDNSLYVLENNVILRITENHQVSIIAGRPMHCQVPGIDYSLSKLAIHSALESASAIAISHTGVLYITETDEKKINRLRQVTTNGEICLLAGAASDCDCKNDVNCNCYSGDDAYATDAILNSPSSLAVAPDGTIYIADLGNIRIRAVSKNKPVLNAFNQYEAASPGEQELYVFNADGIHQYTVSLVTGEYLYNFTYSTDNDVTELIDNNGNSLKIRRDSSGMPRHLLMPDNQIITLTVGTNGGLKVVSTQNLELGLMTYDGNTGLLATKSDETGWTTFYDYDHEGRLTNVTRPTGVVTSLHREMEKSITIDIENSNRDDDVTVITNLSSVEASYTVVQDQVRNSYQLCNNGTLRVMYANGMGISFHSEPHVLAGTITPTIGRCNISLPMENGLNSIEWRLRKEQIKGKVTIFGRKLRVHGRNLLSIDYDRNIRTEKIYDDHRKFTLRIIYDQVGRPFLWLPSSGLAAVNVSYFFNGRLAGLQRGAMSERTDIDKQGRIVSRMFADGKVWSYSYLDKSMVLLLQSQRQYIFEYDSSDRLLAVTMPSVARHSMSTHTSIGYIRNIYNPPESNASVIFDYSDDGRILKTSFLGTGRQVFYKYGKLSKLSEIVYDSTAVTFGYDETTGVLKMVNLQSGGFSCTIRYRKIGPLVDKQIYRFSEEGMVNARFDYTYHDNSFRIASIKPVISETPLPVDLYRYDEISGKVEHFGKFGVIYYDINQIITTAVMTLSKHFDTHGRIKEVQYEMFRSLMYWMTVQYDSMGRVIKRELKLGPYANTTKYTYDYDGDGQLQSVAVNDRPTWRYSYDLNGNLHLLNPGNSVRLMPLRYDLRDRITRLGDVQYKIDDDGYLCQRGSDIFEYNSKGLLTRAYNKASGWSVQYRYDGVGRRASYKTNLGHHLQYFYSDLHNPTRITHVYNHSNSEITSLYYDLQGHLFAMESSSGEEYYVASDNTGTPLAVFSINGLMIKQLQYTAYGEIYYDSNPDFQMVIGFHGGLYDPLTKLVHFTQRDYDVLAGRWTSPDYTMWKNVGKEPAPFNLYMFKSNNPLSSELDLKNYVTDVKSWLVMFGFQLSNIIPGFPRAKMYFVPPPYELSESQASENGQLITGVQQTTERHNQAFMALEGQVITKKLHASIREKAGHWFATTTPIIGKGIMFAIKEGRVTTGVSSIASEDSRKVASVLNNAYYLDKMHYSIEGKDTHYFVKIGSADGDLVTLGTTIGRKVLESGVNVTVSQPTLLVNGRTRRFTNIEFQYSTLLLSIRYGLTPDTLDEEKARVLDQARQRALGTAWAKEQQKARDGREGSRLWTEGEKQQLLSTGRVQGYEGYYVLPVEQYPELADSSSNIQFLRQNEMGKR

SEQ ID NO: 431 - protein, 1461 aa, Homo sapiens
MAAGGGGGSSKASSSSASSAGALESSLDRKFQSVTNTMESIQGLSSWCIENKKHHSTIVYHWMKWLRRSAYPHRLNLFYLANDVIQNCKRKNAIIFRESFADVLPEAAALVKDPSVSKSVERIFKIWEDRNVYPEEMIVALREALSTTFKTQKQLKENLNKQPNKQWKKSQTSTNPKAALKSKIVAEFRSQALIEELLLYKRSEDQIELKEKQLSTMRVDVCSTETLKCLKDKTGGKKFSKEFEEASSKLEEFVNGLDKQVKNGPSLTEALENAGIFYEAQYKEVKVVANAYKTFANRVNNLKKKLDQLKSTLPDPEESPVPSPSMDAPSPTGSESPFQGMGGEESQSPTMESEKSATPEPVTDNRDVEDMELSDVEDDGSKIIVEDRKEKPAEKSAVSTSVPTKPTENISKASSCTPVPVTMTATPPLPKPVNTSLSPSPALALPNLANVDLAKISSILSSLTSVMKNTGVSPASRPSPGTPTSPSNLTSGLKTPAPATTTSHNPLANILSKVEITPESILSALSKTQTQSAPALQGLSSLLQSVTGNPVPASEAASQSTSASPANTTVSTIKGRNLPSSAQPFIPKSFNYSPNSSTSEVSSTSASKASIGQSPGLPSTTFKLPSNSLGFTATHNTSPAAPPTEVTICQSSEVSKPKLESESTSPSLEMKIHNFLKGNPGFSGLNLNIPILSSLGSSAPSESHPSDFQRGPTSTSIDNIDGTPVRDERSGTPTQDEMMDKPTSSSVDTMSLLSKIISPGSSTPSSTRSPPPGRDESYPRELSNSVSTYRPFGLGSESPYKQPSDGMERPSSLMDSSQEKFYPDTSFQEDEDYRDFEYSGPPPSAMMNLEKKPAKSILKSSKLSDTTEYQPILSSYSHRAQEFGVKSAFPPSVRALLDSSENCDRLSSSPGLFGAFSVRGNEPGSDRSPSPSKNDSFFTPDSNHNSLSQSTTGHLSLPQKQYPDSPHPVPHRSLFSPQNTLAAPTGHPPTSGVEKVLASTISTTSTIEFKNMLKNASRKPSDDKHFGQAPSKGTPSDGVSLSNLTQPSLTATDQQQQEEHYRIETRVSSSCLDLPDSTEEKGAPIETLGYHSASNRRMSGEPIQTVESIRVPGKGNRGHGREASRVGWFDLSTSGSSFDNGPSSASELASLGGGGSGGLTGFKTAPYKERAPQFQESVGSFRSNSFNSTFEHHLPPSPLEHGTPFQREPVGPSSAPPVPPKDHGGIFSRDAPTHLPSVDLSNPFTKEAALAHAAPPPPPGEHSGIPFPTPPPPPPPGEHSSSGGSGVPFSTPPPPPPPVDHSGVVPFPAPPLAEHGVAGAVAVFPKDHSSLLQGTLAEHFGVLPGPRDHGGPTQRDLNGPGLSRVRESLTLPSHSLEHLGPPHGGGGGGGSNSSSGPPLGPSHRDTISRSGIILRSPRPDFRPREPFLSRDPFHSLKRPRPPFARGPPFFAPKRPFFPPRY

SEQ ID NO: 432 - protein, 4302 aa, Homo sapiens
MPPAAPARLALALGLGLWLGALAGGPGRGCGPCEPPCLCGPAPGAACRVNCSGRGLRTLGPALRIPADATALDVSHNLLRALDVGLLANLSALAELDISNNKISTLEEGIFANLFNLSEINLSGNPFECDCGLAWLPRWAEEQQVRVVQPEAATCAGPGSLAGQPLLGIPLLDSGCGEEYVACLPDNSSGTVAAVSFSAAHEGLLQPEACSAFCFSTGQGLAALSEQGWCLCGAAQPSSASFACLSLCSGPPPPPAPTCRGPTLLQHVFPASPGATLVGPHGPLASGQLAAFHIAAPLPVTATRWDFGDGSAEVDAAGPAASHRYVLPGRYHVTAVLALGAGSALLGTDVQVEAAPAALELVCPSSVQSDESLDLSIQNRGGSGLEAAYSIVALGEEPARAVHPLCPSDTEIFPGNGHCYRLVVEKAAWLQAQEQCQAWAGAALAMVDSPAVQRFLVSRVTRSLDVWIGFSTVQGVEVGPAPQGEAFSLESCQNWLPGEPHPATAEHCVRLGPTGWCNTDLCSAPHSYVCELQPGGPVQDAENLLVGAPSGDLQGPLTPLAQQDGLSAPHEPVEVMVFPGLRLSREAFLTTAEFGTQELRRPAQLRLQVYRLLSTAGTPENGSEPESRSPDNRTQLAPACMPGGRWCPGANICLPLDASCHPQACANGCTSGPGLPGAPYALWREFLFSVPAGPPAQYSVTLHGQDVLMLPGDLVGLQHDAGPGALLHCSPAPGHPGPQAPYLSANASSWLPHLPAQLEGTWACPACALRLLAATEQLTVLLGLRPNPGLRLPGRYEVRAEVGNGVSRHNLSCSFDVVSPVAGLRVIYPAPRDGRLYVPTNGSALVLQVDSGANATATARWPGGSVSARFENVCPALVATFVPGCPWETNDTLFSVVALPWLSEGEHVVDVVVENSASRANLSLRVTAEEPICGLRATPSPEARVLQGVLVRYSPVVEAGSDMVFRWTINDKQSLTFQNVVFNVIYQSAAVFKLSLTASNHVSNVTVNYNVTVERMNRMQGLQVSTVPAVLSPNATLALTAGVLVDSAVEVAFLWTFGDGEQALHQFQPPYNESFPVPDPSVAQVLVEHNVMHTYAAPGEYLLTVLASNAFENLTQQVPVSVRASLPSVAVGVSDGVLVAGRPVTFYPHPLPSPGGVLYTWDFGDGSPVLTQSQPAANHTYASRGTYHVRLEVNNTVSGAAAQADVRVFEELRGLSVDMSLAVEQGAPVVVSAAVQTGDNITWTFDMGDGTVLSGPEATVEHVYLRAQNCTVTVGAASPAGHLARSLHVLVFVLEVLRVEPAACIPTQPDARLTAYVTGNPAHYLFDWTFGDGSSNTTVRGCPTVTHNFTRSGTFPLALVLSSRVNRAHYFTSICVEPEVGNVTLQPERQFVQLGDEAWLVACAWPPFPYRYTWDFGTEEAAPTRARGPEVTFIYRDPGSYLVTVTASNNISAANDSALVEVQEPVLVTSIKVNGSLGLELQQPYLFSAVGRGRPASYLWDLGDGGWLEGPEVTHAYNSTGDFTVRVAGWNEVSRSEAWLNVTVKRRVRGLVVNASRTVVPLNGSVSFSTSLEAGSDVRYSWVLCDRCTPIPGGPTISYTFRSVGTFNIIVTAENEVGSAQDSIFVYVLQLIEGLQVVGGGRYFPTNHTVQLQAVVRDGTNVSYSWTAWRDRGPALAGSGKGFSLTVLEAGTYHVQLRATNMLGSAWADCTMDFVEPVGWLMVAASPNPAAVNTSVTLSAELAGGSGVVYTWSLEEGLSWETSEPFTTHSFPTPGLHLVTMTAGNPLGSANATVEVDVQVPVSGLSIRASEPGGSFVAAGSSVPFWGQLATGTNVSWCWAVPGGSSKRGPHVTMVFPDAGTFSIRLNASNAVSWVSATYNLTAEEPIVGLVLWASSKVVAPGQLVHFQILLAAGSAVTFRLQVGGANPEVLPGPRFSHSFPRVGDHVVSVRGKNHVSWAQAQVRIVVLEAVSGLQVPNCCEPGIATGTERNFTARVQRGSRVAYAWYFSLQKVQGDSLVILSGRDVTYTPVAAGLLEIQVRAFNALGSENRTLVLEVQDAVQYVALQSGPCFTNRSAQFEAATSPSPRRVAYHWDFGDGSPGQDTDEPRAEHSYLRPGDYRVQVNASNLVSFFVAQATVTVQVLACREPEVDVVLPLQVLMRRSQRNYLEAHVDLRDCVTYQTEYRWEVYRTASCQRPGRPARVALPGVDVSRPRLVLPRLALPVGHYCFVFVVSFGDTPLTQSIQANVTVAPERLVPIIEGGSYRVWSDTRDLVLDGSESYDPNLEDGDQTPLSFHWACVASTQREAGGCALNFGPRGSSTVTIPRERLAAGVEYTFSLTVWKAGRKEEATNQTVLIRSGRVPIVSLECVSCKAQAVYEVSRSSYVYLEGRCLNCSSGSKRGRWAARTFSNKTLVLDETTTSTGSAGMRLVLRRGVLRDGEGYTFTLTVLGRSGEEEGCASIRLSPNRPPLGGSCRLFPLGAVHALTTKVHFECTGWHDAEDAGAPLVYALLLRRCRQGHCEEFCVYKGSLSSYGAVLPPGFRPHFEVGLAVVVQDQLGAAVVALNRSLAITLPEPNGSATGLTVWLHGLTASVLPGLLRQADPQHVIEYSLALVTVLNEYERALDVAAEPKHERQHRAQIRKNITETLVSLRVHTVDDIQQIAAALAQCMGPSRELVCRSCLKQTLHKLEAMMLILQAETTAGTVTPTAIGDSILNITGDLIHLASSDVRAPQPSELGAESPSRMVASQAYNLTSALMRILMRSRVLNEEPLTLAGEEIVAQGKRSDPRSLLCYGGAPGPGCHFSIPEAFSGALANLSDVVQLIFLVDSNPFPFGYISNYTVSTKVASMAFQTQAGAQIPIERLASERAITVKVPNNSDWAARGHRSSANSANSVVVQPQASVGAVVTLDSSNPAAGLHLQLNYTLLDGHYLSEEPEPYLAVYLHSEPRPNEHNCSASRRIRPESLQGADHRPYTFFISPGSRDPAGSYHLNLSSHFRWSALQVSVGLYTSLCQYFSEEDMVWRTEGLLPLEETSPRQAVCLTRHLTAFGASLFVPPSHVRFVFPEPTADVNYIVMLTCAVCLVTYMVMAAILHKLDQLDASRGRAIPFCGQRGRFKYEILVKTGWGRGSGTTAHVGIMLYGVDSRSGHRHLDGDRAFHRNSLDIFRIATPHSLGSVWKIRVWHDNKGLSPAWFLQHVIVRDLQTARSAFFLVNDWLSVETEANGGLVEKEVLAASDAALLRFRRLLVAELQRGFFDKHIWLSIWDRPPRSRFTRIQRATCCVLLICLFLGANAVWYGAVGDSAYSTGHVSRLSPLSVDTVAVGLVSSVVVYPVYLAILFLFRMSRSKVAGSPSPTPAGQQVLDIDSCLDSSVLDSSFLTFSGLHAEAFVGQMKSDLFLDDSKSLVCWPSGEGTLSWPDLLSDPSIVGSNLRQLARGQAGHGLGPEEDGFSLASPYSPAKSFSASDEDLIQQVLAEGVSSPAPTQDTHMETDLLSSLSSTPGEKTETLALQRLGELGPPSPGLNWEQPQAARLSRTGLVEGLRKRLLPAWCASLAHGLSLLLVAVAVAVSGWVGASFPPGVSVAWLLSSSASFLASFLGWEPLKVLLEALYFSLVAKRLHPDEDDTLVESPAVTPVSARVPRVRPPHGFALFLAKEEARKVKRLHGMLRSLLVYMLFLLVTLLASYGDASCHGHAYRLQSAIKQELHSRAFLAITRSEELWPWMAHVLLPYVHGNQSSPELGPPRLRQVRLQEALYPDPPGPRVHTCSAAGGFSTSDYDVGWESPHNGSGTWAYSAPDLLGAWSWGSCAVYDSGGYVQELGLSLEESRDRLRFLQLHNWLDNRSRAVFLELTRYSPAVGLHAAVTLRLEFPAAGRALAALSVRPFALRRLSAGLSLPLLTSVCLLLFAVHFAVAEARTWHREGRWRVLRLGAWARWLLVALTAATALVRLAQLGAADRQWTRFVRGRPRRFTSFDQVAQLSSAARGLAASLLFLLLVKAAQQLRFVRQWSVFGKTLCRALPELLGVTLGLVVLGVAYAQLAILLVSSCVDSLWSVAQALLVLCPGTGLSTLCPAESWHLSPLLCVGLWALRLWGALRLGAVILRWRYHALRGELYRPAWEPQDYEMVELFLRRLRLWMGLSKVKEFRHKVRFEGMEPLPSRSSRGSKVSPDVPPPSAGSDASHPSTSSSQLDGLSVSLGRLGTRCEPEPSRLQAVFEALLTQFDRLNQATEDVYQLEQQLHSLQGRRSSRAPAGSSRGPSPGLRPALPSRLARASRGVDLATGPSRTPLRAKNKVHPSST

SEQ ID NO: 433 - protein, 1820 aa, Homo sapiens
MEPPQETNRPFSTLDNRSGQVQVLSATPLLQRNPYSSPDIMHIKGSEASSVPYALNQGTTALPKNKNQEGTGHRLLNMLRKTLKESDSEELEITQETPNLVPFGDVVGCLGIHIKNCRHFMPKISLQHYANLFIRISINKAVKCTKMCSLLSKNDEKNTVIKFDEVKYFSVQVPRRYDDKRNNILLELIQYDNREKRAFLLGSVQIHLYEVIQKGCFIEEVQVLHGNIFVCRLEVEFMFSYGNFGYGFSHQLKPLQKITEPSMFMNLAPPPERTDPVTKVITPQTVEYPAFLSPDLNVTVGTPAVQSSNQPSVVRLEKLQQQPRERLEKMKKEYRNLNTWIDKANYLESILMPKLEHKDSEETNIDEASENTKSNHPEEELENIVGVDIPLVNEEAETTANELLDNDSEKGLTIPTLNQSDQDNSTADASKNDESTPSPTEVHSLCTISNQETIKAGRIPPLGERQSESMPDRKMKNVFFPLEVKLKDNYPSILKADSSLSEVAFSPKEYNSPSFRPEYIEFKPKFQFQKFNKNGFDPFLRNINKMSVRKRKDQDIYKYRNILGAEVIEHEDQDPPYPAQSKTAGPANTTWAHDPNIFTTKMLETENKLAPDPTINTIKGLDTKNSLKENLPNVSLPSIKGESSRAGNVQANTCHLSKSLNFTPHIEYLKQSMILKSILSENLQDLSDKLFSKPEVSMNSEAREKSSSPLLSIHDKSSSSMEDNVLEKKQDLNNWLSEKDILNSKTTLSQIIKNIPADSFSEGSQIIENIPADSLLEGGQVIKNIPEYSLSEGGQIIKNIPADSFLESGPGQSPEVEEHVSKKHFEADERDFPIKKNSSTKKKHLISEVPNSKSGSSGTVHDYIMRQIFTAPIFSELEIEVKEPSETPMNLENQLPTPWKRSLSSHILFHEENADEIELPQPRSATSQIIQAFPIDTLLESGIIKVIELDKEHHKSSLLGTGITSPKGNLKDSQEYYSEIRSETEPLSEQSIPIIPKDTTSVSRAEFIQEDQNMFPQDSSYYSIANKELYLPRNGQRLCKDKNDLSSTLESLTNSLMDKLSESDEIMLKSFLKNIFNVFFKYNHSERRGQPEKELERLIQPSFTSDTEHLEELQEDFDKADKLDRKPILSPKLRVFLEELSESEVKHLKSELSKQIQHYLVERLSESGHITKEDLPKIYQNLYLMNEKAEQKGPNSFQGKYSETVKEIMSFVNNFNHHFIDKHLEIKLRSFLKEILQNYFLKNISESSLFNETASETIYPNISSLRTKSVSISFHELEQDISKGSFGRRFEINMKYPLSKSLQNYLIALSENELLHLKADLSKHLQSLFIEKLSKSGLMTKKQLEGINQHINLLNSSSIPLKYIKTHLPFRDDCHFVEKHSEKQNKYSRIVQQTTLQTVSEDKLREAELIREKEKKYFPLQNLKGNSSLIKEQKSYYTKEEAKTPSLIKVQPSSNENIQASPLSKSSEILTDILLKKLRKEHVFTQLPQAENSVHKTEIQDPYSWGGKSKITQSKAWCEKTLKMKSLDRKEHVNIYKWTVQEKPEAVLTSYPRIPNARMPREDEYLNRITFPSWQSSTLTHFNTETGEKSKLEDQYCQTLKGNNNNNKKHLVTFAQYKKEIQTLYIKPDEICSEKCAKFPEIQSFQYKVVEDEKNLKPHLFPELFKIEDLKPKVRKERDRVAQPKKSFNKIVRILPTTLPTTRIHLKKSVPRTLLHWTARRTIHDCSDKFEDLHDMTSFTHLKKVKSRSRLLGKSSDDIHNHARHSARPYTAPEVNKQRESYSGKFTSRRMVSSGLVHINDKTSDYEMHKMRPKKIKRGY

SEQ ID NO: 434 - protein, 1940 aa, Homo sapiens
MSSDTEMEVFGIAAPFLRKSEKERIEAQNQPFDAKTYCFVVDSKEEYAKGKIKSSQDGKVTVETEDNRTLVVKPEDVYAMNPPKFDRIEDMAMLTHLNEPAVLYNLKDRYTSWMIYTYSGLFCVTVNPYKWLPVYNPEVVEGYRGKKRQEAPPHIFSISDNAYQFMLTDRENQSILITGESGAGKTVNTKRVIQYFATIAATGDLAKKKDSKMKGTLEDQIISANPLLEAFGNAKTVRNDNSSRFGKFIRIHFGTTGKLASADIETYLLEKSRVTFQLKAERSYHIFYQILSNKKPELIELLLITTNPYDYPFISQGEILVASIDDAEELLATDSAIDILGFTPEEKSGLYKLTGAVMHYGNMKFKQKQREEQAEPDGTEVADKTAYLMGLNSSDLLKALCFPRVKVGNEYVTKGQTVDQVHHAVNALSKSVYEKLFLWMVTRINQQLDTKLPRQHFIGVLDIAGFEIFEYNSLEQLCINFTNEKLQQFFNHHMFVLEQEEYKKEGIEWTFIDFGMDLAACIELIEKPMGIFSILEEECMFPKATDTSFKNKLYDQHLGKSNNFQKPKVVKGRAEAHFSLIHYAGTVDYSVSGWLEKNKDPLNETVVGLYQKSSNRLLAHLYATFATADADSGKKKVAKKKGSSFQTVSALFRENLNKLMSNLRTTHPHFVRCIIPNETKTPGAMEHSLVLHQLRCNGVLEGIRICRKGFPNRILYGDFKQRYRVLNASAIPEGQFIDSKKACEKLLASIDIDHTQYKFGHTKVFFKAGLLGTLEEMRDDRLAKLITRTQAVCRGFLMRVEFQKMVQRRESIFCIQYNIRSFMNVKHWPWMKLFFKIKPLLKSAETEKEMATMKEEFQKTKDELAKSEAKRKELEEKLVTLVQEKNDLQLQVQAESENLLDAEERCDQLIKAKFQLEAKIKEVTERAEDEEEINAELTAKKRKLEDECSELKKDIDDLELTLAKVEKEKHATENKVKNLTEELSGLDETIAKLTREKKALQEAHQQALDDLQAEEDKVNSLNKTKSKLEQQVEDLESSLEQEKKLRVDLERNKRKLEGDLKLAQESILDLENDKQQLDERLKKKDFEYCQLQSKVEDEQTLGLQFQKKIKELQARIEELEEEIEAERATRAKTEKQRSDYARELEELSERLEEAGGVTSTQIELNKKREAEFLKLRRDLEEATLQHEAMVAALRKKHADSVAELGEQIDNLQRVKQKLEKEKSEFKLEIDDLSSSMESVSKSKANLEKICRTLEDQLSEARGKNEEIQRSLSELTTQKSRLQTEAGELSRQLEEKESIVSQLSRSKQAFTQQTEELKRQLEEENKAKNALAHALQSSRHDCDLLREQYEEEQEGKAELQRALSKANSEVAQWRTKYETDAIQRTEELEEAKKKLAQRLQDSEEQVEAVNAKCASLEKTKQRLQGEVEDLMVDVERANSLAAALDKKQRNFDKVLAEWKTKCEESQAELEASLKESRSLSTELFKLKNAYEEALDQLETVKRENKNLEQEIADLTEQIAENGKTIHELEKSRKQIELEKADIQLALEEAEAALEHEEAKILRIQLELTQVKSEIDRKIAEKDEEIEQLKRNYQRTVETMQSALDAEVRSRNEAIRLKKKMEGDLNEIEIQLSHANRQAAETLKHLRSVQGQLKDTQLHLDDALRGQEDLKEQLAIVERRANLLQAEVEELRATLEQTERARKLAEQELLDSNERVQLLHTQNTSLIHTKKKLETDLMQLQSEVEDASRDARNAEEKAKKAITDAAMMAEELKKEQDTSAHLERMKKNLEQTVKDLQHRLDEAEQLALKGGKKQIQKLETRIRELEFELEGEQKKNTESVKGLRKYERRVKELTYQSEEDRKNVLRLQDLVDKLQVKVKSYKRQAEEADEQANAHLTKFRKAQHELEEAEERADIAESQVNKLRAKTRDFTSSRMVVHESEE

SEQ ID NO: 435 - protein, 2109 aa, Homo sapiens
MAERRAFAQKISRTVAAEVRKQISGQYSGSPQLLKNLNIVGNISHHTTVPLTEAVDPVDLEDYLITHPLAVDSGPLRDLIEFPPDDIEVVYSPRDCRTLVSAVPEESEMDPHVRDCIRSYTEDWAIVIRKYHKLGTGFNPNTLDKQKERQKGLPKQVFESDEAPDGNSYQDDQDDLKRRSMSIDDTPRGSWACSIFDLKNSLPDALLPNLLDRTPNEEIDRQNDDQRKSNRHKELFALHPSPDEEEPIERLSVPDIPKEHFGQRLLVKCLSLKFEIEIEPIFASLALYDVKEKKKISENFYFDLNSEQMKGLLRPHVPPAAITTLARSAIFSITYPSQDVFLVIKLEKVLQQGDIGECAEPYMIFKEADATKNKEKLEKLKSQADQFCQRLGKYRMPFAWTAIHLMNIVSSAGSLERDSTEVEISTGERKGSWSERRNSSIVGRRSLERTTSGDDACNLTSFRPATLTVTNFFKQEGDRLSDEDLYKFLADMRRPSSVLRRLRPITAQLKIDISPAPENPHYCLTPELLQVKLYPDSRVRPTREILEFPARDVYVPNTTYRNLLYIYPQSLNFANRQGSARNITVKVQFMYGEDPSNAMPVIFGKSSCSEFSKEAYTAVVYHNRSPDFHEEIKVKLPATLTDHHHLLFTFYHVSCQQKQNTPLETPVGYTWIPMLQNGRLKTGQFCLPVSLEKPPQAYSVLSPEVPLPGMKWVDNHKGVFNVEVVAVSSIHTQDPYLDKFFALVNALDEHLFPVRIGDMRIMENNLENELKSSISALNSSQLEPVVRFLHLLLDKLILLVIRPPVIAGQIVNLGQASFEAMASIINRLHKNLEGNHDQHGRNSLLASYIHYVFRLPNTYPNSSSPGPGGLGGSVHYATMARSAVRPASLNLNRSRSLSNSNPDISGTPTSPDDEVRSIIGSKAMDRSCNRMSSHTETSSFLQTLTGRLPTKKLFHEELALQWVVCSGSVRESALQQAWFFFELMVKSMVHHLYFNDKLEAPRKSRFPERFMDDIAALVSTIASDIVSRFQKDTEMVERLNTSLAFFLNDLLSVMDRGFVFSLIKSCYKQVSSKLYSLPNPSVLVSLRLDFLRIICSHEHYVTLNLPCSLLTPPASPSPSVSSATSQSSGFSTNVQDQKIANMFELSVPFRQQHYLAGLVLTELAVILDPDAEGLFGLHKKVINMVHNLLSSHDSDPRYSDPQIKARVAMLYLPLIGIIMETVPQLYDFTETHNQRGRPICIATDDYESESGSMISQTVAMAIAGTSVPQLTRPGSFLLTSTSGRQHTTFSAESSRSLLICLLWVLKNADETVLQKWFTDLSVLQLNRLLDLLYLCVSCFEYKGKKVFERMNSLTFKKSKDMRAKLEEAILGSIGARQEMVRRSRGQLGTYTIASPPERSPSGSAFGSQENLRWRKDMTHWRQNTEKLDKSRAEIEHEALIDGNLATEANLIILDTLEIVVQTVSVTESKESILGGVLKVLLHSMACNQSAVYLQHCFATQRALVSKFPELLFEEETEQCADLCLRLLRHCSSSIGTIRSHASASLYLLMRQNFEIGNNFARVKMQVTMSLSSLVGTSQNFNEEFLRRSLKTILTYAEEDLELRETTFPDQVQDLVFNLHMILSDTVKMKEHQEDPEMLIDLMYRIAKGYQTSPDLRLTWLQNMAGKHSERSNHAEAAQCLVHSAALVAEYLSMLEDRKYLPVGCVTFQNISSNVLEESAVSDDVVSPDEEGICSGKYFTESGLVGLLEQAAASFSMAGMYEAVNEVYKVLIPIHEANRDAKKLSTIHGKLQEAFSKIVHQSTGWERMFGTYFRVGFYGTKFGDLDEQEFVYKEPAITKLAEISHRLEGFYGERFGEDVVEVIKDSNPVDKCKLDPNKAYIQITYVEPYFDTYEMKDRITYFDKNYNLRRFMYCTPFTLDGRAHGELHEQFKRKTILTTSHAFPYIKTRVNVTHKEEIILTPIEVAIEDMQKKTQELAFATHQDPADPKMLQMVLQGSVGTTVNQGPLEVAQVFLSEIPSDPKLFRHHNKLRLCFKDFTKRCEDALRKNKSLIGPDQKEYQRELERNYHRLKEALQPLINRKIPQLYKAVLPVTCHRDSFSRMSLRKMDL

SEQ ID NO: 436 - protein, 1798 aa, Homo sapiens
MELTSRERGRGQPLPWELRLGLLLSVLAATLAQAPAPDVPGCSRGSCYPATGDLLVGRADRLTASSTCGLNGPQPYCIVSHLQDEKKCFLCDSRRPFSARDNPHSHRIQNVVTSFAPQRRAAWWQSENGIPAVTIQLDLEAEFHFTHLIMTFKTFRPAAMLVERSADFGRTWHVYRYFSYDCGADFPGVPLAPPRHWDDVVCESRYSEIEPSTEGEVIYRVLDPAIPIPDPYSSRIQNLLKITNLRVNLTRLHTLGDNLLDPRREIREKYYYALYELVVRGNCFCYGHASECAPAPGAPAHAEGMVHGACICKHNTRGLNCEQCQDFYRDLPWRPAEDGHSHACRKCECHGHTHSCHFDMAVYLASGNVSGGVCDGCQHNTAGRHCELCRPFFYRDPTKDLRDPAVCRSCDCDPMGSQDGGRCDSHDDPALGLVSGQCRCKEHVVGTRCQQCRDGFFGLSISDRLGCRRCQCNARGTVPGSTPCDPNSGSCYCKRLVTGRGCDRCLPGHWGLSHDLLGCRPCDCDVGGALDPQCDEGTGQCHCRQHMVGRRCEQVQPGYFRPFLDHLIWEAEDTRGQVLDVVERLVTPGETPSWTGSGFVRLQEGQTLEFLVASVPKAMDYDLLLRLEPQVPEQWAELELIVQRPGPVPAHSLCGHLVPKDDRIQGTLQPHARYLIFPNPVCLEPGISYKLHLKLVRTGGSAQPETPYSGPGLLIDSLVLLPRVLVLEMFSGGDAAALERQATFERYQCHEEGLVPSKTSPSEACAPLLISLSTLIYNGALPCQCNPQGSLSSECNPHGGQCLCKPGVVGRRCDLCAPGYYGFGPTGCQACQCSHEGALSSLCEKTSGQCLCRTGAFGLRCDRCQRGQWGFPSCRPCVCNGHADECNTHTGACLGCRDHTGGEHCERCIAGFHGDPRLPYGGQCRPCPCPEGPGSQRHFATSCHQDEYSQQIVCHCRAGYTGLRCEACAPGHFGDPSRPGGRCQLCECSGNIDPMDPDACDPHTGQCLRCLHHTEGPHCAHCKPGFHGQAARQSCHRCTCNLLGTNPQQCPSPDQCHCDPSSGQCPCLPNVQGPSCDRCAPNFWNLTSGHGCQPCACHPSRARGPTCNEFTGQCHCRAGFGGRTCSECQELHWGDPGLQCHACDCDSRGIDTPQCHRFTGHCSCRPGVSGVRCDQCARGFSGIFPACHPCHACFGDWDRVVQDLAARTQRLEQRAQELQQTGVLGAFESSFWHMQEKLGIVQGIVGARNTSAASTAQLVEATEELRREIGEATEHLTQLEADLTDVQDENFNANHALSGLERDRLALNLTLRQLDQHLDLLKHSNFLGAYDSIRHAHSQSAEAERRANTSALAVPSPVSNSASARHRTEALMDAQKEDFNSKHMANQRALGKLSAHTHTLSLTDINELVCGAPGDAPCATSPCGGAGCRDEDGQPRCGGLSCNGAAATADLALGRARHTQAELQRALAEGGSILSRVAETRRQASEAQQRAQAALDKANASRGQVEQANQELQELIQSVKDFLNQEGADPDSIEMVATRVLELSIPASAEQIQHLAGAIAERVRSLADVDAILARTVGDVRRAEQLLQDARRARSWAEDEKQKAETVQAALEEAQRAQGIAQGAIRGAVADTRDTEQTLYQVQERMAGAERALSSAGERARQLDALLEALKLKRAGNSLAASTAEETAGSAQGRAQEAEQLLRGPLGDQYQTVKALAERKAQGVLAAQARAEQLRDEARDLLQAAQDKLQRLQELEGTYEENERALESKAAQLDGLEARMRSVLQAINLQVQIYNTCQ

SEQ ID NO: 437 - protein, 2986 aa, Homo sapiens
MTDRFWDQWYLWYLRLLRLLDRGSFRNDGLKASDVLPILKEKVAFVSGGRDKRGGPILTFPARSNHDRIRQEDLRKLVTYLASVPSEDVCKRGFTVIIDMRGSKWDLIKPLLKTLQEAFPAEIHVALIIKPDNFWQKQKTNFGSSKFIFETSMVSVEGLTKLVDPSQLTEEFDGSLDYNHEEWIELRLSLEEFFNSAVHLLSRLEDLQEMLARKEFPVDVEGSRRLIDEHTQLKKKVLKAPVEELDREGQRLLQCIRCSDGFSGRNCIPGSADFQSLVPKITSLLDKLHSTRQHLHQMWHVRKLKLDQCFQLRLFEQDAEKMFDWISHNKELFLQSHTEIGVSYQYALDLQTQHNHFAMNSMNAYVNINRIMSVASRLSEAGHYASQQIKQISTQLDQEWKSFAAALDERSTILAMSAVFHQKAEQFLSGVDAWCKMCSEGGLPSEMQDLELAIHHHQTLYEQVTQAYTEVSQDGKALLDVLQRPLSPGNSESLTATANYSKAVHQVLDVVHEVLHHQRRLESIWQHRKVRLHQRLQLCVFQQDVQQVLDWIENHGEAFLSKHTGVGKSLHRARALQKRHDDFEEVAQNTYTNADKLLEAAEQLAQTGECDPEEIYKAARHLEVRIQDFVRRVEQRKLLLDMSVSFHTHTKELWTWMEDLQKEMLEDVCADSVDAVQELIKQFQQQQTATLDATLNVIKEGEDLIQQLRSAPPSLGEPSEARDSAVSNNKTPHSSSISHIESVLQQLDDAQVQMEELFHERKIKLDIFLQLRIFEQYTIEVTAELDAWNEDLLRQMNDFNTEDLTLAEQRLQRHTERKLAMNNMTFEVIQQGQDLHQYITEVQASGIELICEKDIDLAAQVQELLEFLHEKQHELELNAEQTHKRLEQCLQLRHLQAEVKQVLGWIRNGESMLNASLVNASSLSEAEQLQREHEQFQLAIESLFHATSLQKTHQSALQVQQKAEVLLQAGHYDADAIRECAEKVALHWQQLMLKMEDRLKLVNASVAFYKTSEQVCSVLESLEQEYRRDEDWCGGRDKLGPAAEIDHVIPLISKHLEQKEAFLKACTLARRNAEVFLKYIHRNNVSMPSVASHTRGPEQQVKAILSELLQRENRVLHFWTLKKRRLDQCQQYVVFERSAKQALDWIQETGEFYLSTHTSTGETTEETQELLKEYGEFRVPAKQTKEKVKLLIQLADSFVEKGHIHATEIRKWVTTVDKHYRDFSLRMGKYRYSLEKALGVNTEDNKDLELDIIPASLSDREVKLRDANHEVNEEKRKSARKKEFIMAELLQTEKAYVRDLHECLETYLWEMTSGVEEIPPGILNKEHIIFGNIQEIYDFHNNIFLKELEKYEQLPEDVGHCFVTWADKFQMYVTYCKNKPDSNQLILEHAGTFFDEIQQRHGLANSISSYLIKPVQRITKYQLLLKELLTCCEEGKGELKDGLEVMLSVPKKANDAMHVSMLEGFDENLDVQGELILQDAFQVWDPKSLIRKGRERHLFLFEISLVFSKEIKDSSGHTKYVYKNKLLTSELGVTEHVEGDPCKFALWSGRTPSSDNKTVLKASNIETKQEWIKNIREVIQERIIHLKGALKEPLQLPKTPAKQRNNSKRDGVEDIDSQGDGSSQPDTISIASRTSQNTVDSDKLSGGCELTVVLQDFSAGHSSELTIQVGQTVELLERPSERPGWCLVRTTERSPPLEGLVPSSALCISHSRSSVEMDCFFPLVKDAYSHSSSENGGKSESVANLQAQPSLNSIHSSPGPKRSTNTLKKWLTSPVRRLNSGKADGNIKKQKKVRDGRKSFDLGSPKPGDETTPQGDSADEKSKKGWGEDEPDEESHTPLPPPMKIFDNDPTQDEMSSSLLAARQASTEVPTAADLVNAIEKLVKNKLSLEGSSYRGSLKDPAGCLNEGMAPPTPPKNPEEEQKAKALRGRMFVLNELVQTEKDYVKDLGIVVEGFMKRIEEKGVPEDMRGKDKIVFGNIHQIYDWHKDFFLAELEKCIQEQDRLAQLFIKHERKLHIYVWYCQNKPRSEYIVAEYDAYFEEVKQEINQRLTLSDFLIKPIQRITKYQLLLKDFLRYSEKAGLECSDIEKAVELMCLVPKRCNDMMNLGRLQGFEGTLTAQGKLLQQDTFYVIELDAGMQSRTKERRVFLFEQIVIFSELLRKGSLTPGYMFKRSIKMNYLVLEENVDNDPCKFALMNRETSERVVLQAANADIQQAWVQDINQVLETQRDFLNALQSPIEYQRKERSTAVMRSQPARLPQASPRPYSSVPAGSEKPPKGSSYNPPLPPLKISTSNGSPGFEYHQPGDKFEASKQNDLGGCNGTSSMAVIKDYYALKENEICVSQGEVVQVLAVNQQNMCLVYQPASDHSPAAEGWVPGSILAPLTKATAAESSDGSIKKSCSWHTLRMRKRAEVENTGKNEATGPRKPKDILGNKVSVKETNSSEESECDDLDPNTSMEILNPNFIQEVAPEFLVPLVDVTCLLGDTVILQCKVCGRPKPTITWKGPDQNILDTDNSSATYTVSSCDSGEITLKICNLMPQDSGIYTCIATNDHGTTSTSATVKVQGVPAAPNRPIAQERSCTSVILRWLPPSSTGNCTISGYTVEYREEGSQIWQQSVASTLDTYLVIEDLSPGCPYQFRVSASNPWGISLPSEPSEFVRLPEYDAAADGATISWKENFDSAYTELNEIGRGRFSIVKKCIHKATRKDVAVKFVSKKMKKKEQAAHEAALLQHLQHPQYITLHDTYESPTSYILILELMDDGRLLDYLMNHDELMEEKVAFYIRDIMEALQYLHNCRVAHLDIKPENLLIDLRIPVPRVKLIDLEDAVQISGHFHIHHLLGNPEFAAPEVIQGIPVSLGTDIWSIGVLTYVMLSGVSPFLDESKEETCINVCRVDFSFPHEYFCGVSNAARDFINVILQEDFRRRPTAATCLQHPWLQPHNGSYSKIPLDTSRLACFIERRKHQNDVRPIPNVKSYIVNRVNQGT

SEQ ID NO: 438 - protein, 1591 aa, Homo sapiens
MGNAESQHVEHEFYGEKHASLGRKHTSRSLRLSHKTRRTRHASSGKVIHRNSEVSTRSSSTPSIPQSLAENGLEPFSQDGTLEDFGSPIWVDRVDMGLRPVSYTDSSVTPSVDSSIVLTAASVQSMPDTEESRLYGDDATYLAEGGRRQHSYTSNGPTFMETASFKKKRSKSADIWREDSLEFSLSDLSQEHLTSNEEILGSAEEKDCEEARGMETRASPRQLSTCQRANSLGDLYAQKNSGVTANGGPGSKFAGYCRNLVSDIPNLANHKMPPAAAEETPPYSNYNTLPCRKSHCLSEGATNPQISHSNSMQGRRAKTTQDVNAGEGSEFADSGIEGATTDTDLLSRRSNATNSSYSPTTGRAFVGSDSGSSSTGDAARQGVYENFRRELEMSTTNSESLEEAGSAHSDEQSSGTLSSPGQSDILLTAAQGTVRKAGALAVKNFLVHKKNKKVESATRRKWKHYWVSLKGCTLFFYESDGRSGIDHNSIPKHAVWVENSIVQAVPEHPKKDFVFCLSNSLGDAFLFQTTSQTELENWITAIHSACATAVARHHHKEDTLRLLKSEIKKLEQKIDMDEKMKKMGEMQLSSVTDSKKKKTILDQIFVWEQNLEQFQMDLFRFRCYLASLQGGELPNPKRLLAFASRPTKVAMGRLGIFSVSSFHALVAARTGETGVRRRTQAMSRSASKRRSRFSSLWGLDTTSKKKQGRPSINQVFGEGTEAVKKSLEGIFDDIVPDGKREKEVVLPNVHQHNPDCDIWVHEYFTPSWFCLPNNQPALTVVRPGDTARDTLELICKTHQLDHSAHYLRLKFLIENKMQLYVPQPEEDIYELLYKEIEICPKVTQSIHIEKSDTAADTYGFSLSSVEEDGIRRLYVNSVKETGLASKKGLKAGDEILEINNRAADALNSSMLKDFLSQPSLGLLVRTYPELEEGVELLESPPHRVDGPADLGESPLAFLTSNPGHSLCSEQGSSAETAPEETEGPDLESSDETDHSSKSTEQVAAFCRSLHEMNPSDQSPSPQDSTGPQLATMRQLSDADKLRKVICELLETERTYVKDLNCLMERYLKPLQKETFLTQDELDVLFGNLTEMVEFQVEFLKTLEDGVRLVPDLEKLEKVDQFKKVLFSLGGSFLYYADRFKLYSAFCASHTKVPKVLVKAKTDTAFKAFLDAQNPKQQHSSTLESYLIKPIQRILKYPLLLRELFALTDAESEEHYHLDVAIKTMNKVASHINEMQKIHEEFGAVFDQLIAEQTGEKKEVADLSMGDLLLHTTVIWLNPPASLGKWKKEPELAAFVFKTAVVLVYKDGSKQKKKLVGSHRLSIYEDWDPFRFRHMIPTEALQVRALASADAEANAVCEIVHVKSESEGRPERVFHLCCSSPESRKDFLKAVHSILRDKHRRQLLKTESLPSSQQYVPFGGKRLCALKGARPAMSRAVSAPSKSLGRRRRRLARNRFTIDSDAVSASSPEKESQQPPGGGDTDRWVEEQFDLAQYEEQDDIKETDILSDDDEFCESVKGASVDRDLQERLQATSISQRERGRKTLDSHASRMAQLKKQAALSGINGGLESASEEVIWVRREDFAPSRKLNTEI

SEQ ID NO: 439 - protein, 1939 aa, Homo sapiens
MSSDSEMAIFGEAAPFLRKSEKERIEAQNKPFDAKTSVFVVDPKESYVKAIVQSREGGKVTAKTEAGATVTVKEDQVFSMNPPKYDKIEDMAMMTHLHEPAVLYNLKERYAAWMIYTYSGLFCVTVNPYKWLPVYNPEVVTAYRGKKRQEAPPHIFSISDNAYQFMLTDRENQSILITGESGAGKTVNTKRVIQYFATIAVTGEKKKEEPASGKMQGTLEDQIISANPLLEAFGNAKTVRNDNSSRFGKFIRIHFGATGKLASADIETYLLEKSRVTFQLKAERSYHIFYQILSNKKPELIEMLLITTNPYDFAFVSQGEITVPSIDDQEELMATDSAVDILGFTADEKVAIYKLTGAVMHYGNMKFKQKQREEQAEPDGTEVADKAAYLTSLNSADLLKSLCYPRVKVGNEFVTKGQTVQQVYNAVGALAKAIYEKMFLWMVTRINQQLDTKQPRQYFIGVLDIAGFEIFDFNSLEQLCINFTNEKLQQFFNHHMFVLEQEEYKKEGIEWEFIDFGMDLAACIELIEKPMGIFSILEEECMFPKATDTSFKNKLYEQHLGKSNNFQKPKPAKGKPEAHFSLVHYAGTVDYNIAGWLDKNKDPLNETVVGLYQKSAMKTLAFLFSGAQTAEAEGGGGKKGGKKKGSSFQTVSALFRENLNKLMTNLRSTHPHFVRCIIPNETKTPGAMEHELVLHQLRCNGVLEGIRICRKGFPSRILYADFKQRYKVLNASAIPEGQFIDSKKASEKLLGSIEIDHTQYKFGHTKVFFKAGLLGTLEEMRDEKLAQLITRTQAICRGFLMRVEFRKMMERRESIFCIQYNIRAFMNVKHWPWMKLYFKIKPLLKSAETEKEMANMKEEFEKTKEELAKTEAKRKELEEKMVTLMQEKNDLQLQVQAEADALADAEERCDQLIKTKIQLEAKIKEVTERAEDEEEINAELTAKKRKLEDECSELKKDIDDLELTLAKVEKEKHATENKVKNLTEEMAGLDETIAKLTKEKKALQEAHQQTLDDLQMEEDKVNTLTKAKTKLEQQVDDLEGSLEQEKKLCMDLERAKRKLEGDLKLAQESTMDTENDKQQLNEKLKKKEFEMSNLQGKIEDEQALAIQLQKKIKELQARIEELEEEIEAERASRAKAEKQRSDLSRELEEISERLEEAGGATSAQIEMNKKREAEFQKMRRDLEESTLQHEATAAALRKKHADSVAELGEQIDSLQRVKQKLEKEKSELKMEINDLASNMETVSKAKANFEKMCRTLEDQLSEIKTKEEEQQRLINELSAQKARLHTESGEFSRQLDEKDAMVSQLSRGKQAFTQQIEELKRQLEEETKAKSTLAHALQSARHDCDLLREQYEEEQEAKAELQRGMSKANSEVAQWRTKYETDAIQRTEELEEAKKKLAQRLQDAEEHVEAVNSKCASLEKTKQRLQNEVEDLMIDVERSNAACIALDKKQRNFDKVLAEWKQKYEETQAELEASQKESRSLSTELFKVKNAYEESLDHLETLKRENKNLQQEISDLTEQIAEGGKHIHELEKVKKQLDHEKSELQTSLEEAEASLEHEEGKILRIQLELNQVKSEIDRKIAEKDEELDQLKRNHLRVVESMQSTLDAEIRSRNDALRIKKKMEGDLNEMEIQLNHANRQAAEALRNLRNTQGILKDTQLHLDDAIRGQDDLKEQLAMVERRANLMQAEVEELRASLERTERGRKMAEQELLDASERVQLLHTQNTSLINTKKKLETDISQIQGEMEDIVQEARNAEEKAKKAITDAAMMAEELKKEQDTSAHLERMKKNMEQTVKDLQLRLDEAEQLALKGGKKQIQKLEARVRELESEVESEQKHNVEAVKGLRKHERRVKELTYQTEEDRKNILRLQDLVDKLQTKVKAYKRQAEEAEEQSNVNLAKFRKLQHELEEAKERADIAESQVNKLRVKSREVHTKVISEE

SEQ ID NO: 440 - protein, 1199 aa, Homo sapiens
MASAGTQHYSIGLRQKNSFKQSGPSGTVPATPPEKPSEGRVWPQAHQQVKPIWKLEKKQVETLSAGLGPGLLGVPPQPAYFFCPSTLCSSGTTAVIAGHSSSCYLHSLPDLFNSTLLYRRSSYRQKPYQQLESFCLRSSPSEKSPFSLPQKSLPVSLTANKATSSMVFSMAQPMASSSTEPYLCLAAAGENPSGKSLASAISGKIPSPLSSSYKPMLNNNSFMWPNSTPVPLLQTTQGLKPVSPPKIQPVSWHHSGGTGDCAPQPVDHKVPKSIGTVPADASAHIALSTASSHDTSTTSVASSWYNRNNLAMRAEPLSCALDDSSDSQDPTKEIRFTEAVRKLTARGFEKMPRQGCQLEQSSFLNPSFQWNVLNRSRRWKPPAVNQQFPQEDAGSVRRVLPGASDTLGLDNTVFCTKRISIHLLASHASGLNHNPACESVIDSSAFGEGKAPGPPFPQTLGIANVATRLSSIQLGQSEKERPEEARELDSSDRDISSATDLQPDQAETEDTEEELVDGLEDCCSRDENEEEEGDSECSSLSAVSPSESVAMISRSCMEILTKPLSNHEKVVRPALIYSLFPNVPPTIYFGTRDERVEKLPWEQRKLLRWKMSTVTPNIVKQTIGRSHFKISKRNDDWLGCWGHHMKSPSFRSIREHQKLNHFPGSFQIGRKDRLWRNLSRMQSRFGKKEFSFFPQSFILPQDAKLLRKAWESSSRQKWIVKPPASARGIGIQVIHKWSQLPKRRPLLVQRYLHKPYLISGSKFDLRIYVYVTSYDPLRIYLFSDGLVRFASCKYSPSMKSLGNKFMHLTNYSVNKKNAEYQANADEMACQGHKWALKALWNYLSQKGVNSDAIWEKIKDVVVKTIISSEPYVTSLLKMYVRRPYSCHELFGFDIMLDENLKPWVLEVNISPSLHSSSPLDISIKGQMIRDLLNLAGFVLPNAEDIISSPSSCSSSTTSLPTSPGDKCRMAPEHVTAQKMKKAYYLTQKIPDQDFYASVLDVLTPDDVRILVEMEDEFSRRGQFERIFPSHISSRYLRFFEQPRYFNILTTQWEQKYHGNKLKGVDLLRSWCYKGFHMGVVSDSAPVWSLPTSLLTISKDDVILNAFSKSETSKLGKQSSCEVSLLLSEDGTTPKSKKTQAGLSPYPQKPSSSKDSEDTSKEPSLSTQTLPVIKCSGQTSRLSASSTFQSISDSLLAVSP

SEQ ID NO: 441 - protein, 1356 aa, Homo sapiens
MKVTVCFGRTRVVVPCGDGHMKVFSLIQQAVTRYRKAIAKDPNYWIQVHRLEHGDGGILDLDDILCDVADDKDRLVAVFDEQDPHHGGDGTSASSTGTQSPEIFGSELGTNNVSAFQPYQATSEIEVTPSVLRANMPLHVRRSSDPALIGLSTSVSDSNFSSEEPSRKNPTRWSTTAGFLKQNTAGSPKTCDRKKDENYRSLPRDTSNWSNQFQRDNARSSLSASHPMVGKWLEKQEQDEDGTEEDNSRVEPVGHADTGLEHIPNFSLDDMVKLVEVPNDGGPLGIHVVPFSARGGRTLGLLVKRLEKGGKAEHENLFRENDCIVRINDGDLRNRRFEQAQHMFRQAMRTPIIWFHVVPAANKEQYEQLSQSEKNNYYSSRFSPDSQYIDNRSVNSAGLHTVQRAPRLNHPPEQIDSHSRLPHSAHPSGKPPSAPASAPQNVFSTTVSSGYNTKKIGKRLNIQLKKGTEGLGFSITSRDVTIGGSAPIYVKNILPRGAAIQDGRLKAGDRLIEVNGVDLVGKSQEEVVSLLRSTKMEGTVSLLVFRQEDAFHPRELNAEPSQMQIPKETKAEDEDIVLTPDGTREFLTFEVPLNDSGSAGLGVSVKGNRSKENHADLGIFVKSIINGGAASKDGRLRVNDQLIAVNGESLLGKTNQDAMETLRRSMSTEGNKRGMIQLIVARRISKCNELKSPGSPPGPELPIETALDDRERRISHSLYSGIEGLDESPSRNAALSRIMGESGKYQLSPTVNMPQDDTVIIEDDRLPVLPPHLSDQSSSSSHDDVGFVTADAGTWAKAAISDSADCSLSPDVDPVLAFQREGFGRQSMSEKRTKQFSDASQLDFVKTRKSKSMDLGIADETKLNTVDDQKAGSPSRDVGPSLGLKKSSSLESLQTAVAEVTLNGDIPFHRPRPRIIRGRGCNESFRAAIDKSYDKPAVDDDDEGMETLEEDTEESSRSGRESVSTASDQPSHSLERQMNGNQEKGDKTDRKKDKTGKEKKKDRDKEKDKMKAKKGMLKGLGDMFRFGKHRKDDKIEKTGKIKIQESFTSEEERIRMKQEQERIQAKTREFRERQARERDYAEIQDFHRTFGCDDELMYGGVSSYEGSMALNARPQSPREGHMMDALYAQVKKPRNSKPSPVDSNRSTPSNHDRIQRLRQEFQQAKQDEDVEDRRRTYSFEQPWPNARPATQSGRHSVSVEVQMQRQRQEERESSQQAQRQYSSLPRQSRKNASSVSQDSWEQNYSPGEGFQSAKENPRYSSYQGSRNGYLGGHGFNARVMLETQELLRQEQRRKEQQMKKQPPSEGPSNYDSYKKVQDPSYAPPKGPFRQDVPPSPSQVARLNRLQTPEKGRPFYS

SEQ ID NO: 442 - protein, 1494 aa, Homo sapiens
MNGGKECDGGDKEGGLPAIQVPVGWQRRVDQNGVLYVSPSGSLLSCLEQVKTYLLTDGTCKCGLECPLILPKVFNFDPGAAVKQRTAEDVKADEDVTKLCIHKRKIIAVATLHKSMEAPHPSLVLTSPGGGTNATPVVPSRAATPRSVRNKSHEGITNSVMPECKNPFKLMIGSSNAMGRLYVQELPGSQQQELHPVYPRQRLGSSEHGQKSPFRGSHGGLPSPASSGSQIYGDGSISPRTDPLGSPDVFTRSNPGFHGAPNSSPIHLNRTPLSPPSVMLHGSPVQSSCAMAGRTNIPLSPTLTTKSPVMKKPMCNFSTNMEIPRAMFHHKPPQGPPPPPPPSCALQKKPLTSEKDPLGILDPIPSKPVNQNPVIINPTSFHSNVHSQVPMMNVSMPPAVVPLPSNLPLPTVKPGHMNHGSHVQRVQHSASTSLSPSPVTSPVHMMGTGIGRIEASPQRSRSSSTSSDHGNFMMPPVGPQATSSGIKVPPRSPRSTIGSPRPSMPSSPSTKSDGHHQYKDIPNPLIAGISNVLNTPSSAAFPTASAGSSSVKSQPGLLGMPLNQILNQHNAASFPASSLLSAAAKAQLANQNKLAGNNSSSSSNSGAVAGSGNTEGHSTLNTMFPPTANMLLPTGEGQSGRAALRDKLMSQQKDALRKRKQPPTTVLSLLRQSQMDSSAVPKPGPDLLRKQGQGSFPISSMSQLLQSMSCQSSHLSSNSTPGCGASNTALPCSANQLHFTDPSMNSSVLQNIPLRGEAVHCHNANTNFVHSNSPVPNHHLAGLINQIQASGNCGMLSQSGMALGNSLHPNPPQSRISTSSTPVIPNSIVSSYNQTSSEAGGSGPSSSIAIAGTNHPAITKTTSVLQDGVIVTTAAGNPLQSQLPIGSDFPFVGQEHALHFPSNSTSNNHLPHPLNPSLLSSLPISLPVNQQHLLNQNLLNILQPSAGEGDMSSINNTLSNHQLTHLQSLLNNNQMFPPNQQQQQLLQGYQNLQAFQGQSTIPCPANNNPMACLFQNFQVRMQEDAALLNKRISTQPGLTALPENPNTTLPPFQDTPCELQPRIDPSLGQQVKDGLVVGGPGDASVDAIYKAVVDAASKGMQVVITTAVNSTTQISPIPALSAMSAFTASIGDPLNLSSAVSAVIHGRNMGGVDHDGRLRNSRGARLPKNLDHGKNVNEGDGFEYFKSASCHTSKKQWDGEQSPRGERNRWKYEEFLDHPGHIHSSPCHERPNNVSTLPFLPGEQHPILLPPRNCPGDKILEENFRYNNYKRTMMSFKERLENTVERCAHINGNRPRQSRGFGELLSTAKQDLVLEEQSPSSSNSLENSLVKDYIHYNGDFNAKSVNGCVPSPSDAKSISSEDDLRNPDSPSSNELIHYRPRTFNVGDLVWGQIKGLTSWPGKLVREDDVHNSCQQSPEEGKVEPEKLKTLTEGLEAYSRVRKRNRKSGKLNNHLEAAIHEAMSELDKMSGTVHQIPQGDRQMRPPKPKRRKISR

SEQ ID NO: 443 - protein, 2446 aa, Homo sapiens
MDTGDTALGQKATSRSGETDKASGRWRQEQSAVIKMSTFGSHEGQRQPQIEPEQIGNTASAQLFGSGKLASPSEVVQQVAEKQYPPHRPSPYSCQHSLSFPQHSLPQGVMHSTKPHQSLEGPPWLFPGPLPSVASEDLFPFPIHGHSGGYPRKKISSLNPAYSQYSQKSIEQAEEAHKKEHKPKKPGKYICPYCSRACAKPSVLKKHIRSHTGERPYPCIPCGFSFKTKSNLYKHRKSHAHAIKAGLVPFTESAVSKLDLEAGFIDVEAEIHSDGEQSTDTDEESSLFAEASDKMSPGPPIPLDIASRGGYHGSLEESLGGPMKVPILIIPKSGIPLPNESSQYIGPDMLPNPSLNTKADDSHTVKQKLALRLSEKKGQDSEPSLNLLSPHSKGSTDSGYFSRSESAEQQISPPNTNAKSYEEIIFGKYCRLSPRNALSVTTTSQERAAMGRKGIMEPLPHVNTRLDVKMFEDPVSQLIPSKGDVDPSQTSMLKSTKFNSESRQPQIIPSSIRNEGKLYPANFQGSNPVLLEAPVDSSPLIRSNSVPTSSATNLTIPPSLRGSHSFDERMTGSDDVFYPGTVGIPPQRMLRRQAAFELPSVQEGHVEVEHHGRMLKGISSSSLKEKKLSPGDRVGYDYDVCRKPYKKWEDSETPKQNYRDISCLSSLKHGGEYFMDPVVPLQGVPSMFGTTCENRKRRKEKSVGDEEDTPMICSSIVSTPVGIMASDYDPKLQMQEGVRSGFAMAGHENLSHGHTERFDPCRPQLQPGSPSLVSEESPSAIDSDKMSDLGGRKPPGNVISVIQHTNSLSRPNSFERSESAELVACTQDKAPSPSETCDSEISEAPVSPEWAPPGDGAESGGKPSPSQQVQQQSYHTQPRLVRQHNIQVPEIRVTEEPDKPEKEKEAQSKEPEKPVEEFQWPQRSETLSQLPAEKLPPKKKRLRLADMEHSSGESSFESTGTGLSRSPSQESNLSHSSSFSMSFEREETSKLSALPKQDEFGKHSEFLTVPAGSYSLSVPGHHHQKEMRRCSSEQMPCPHPAEVPEVRSKSFDYGNLSHAPVSGAAASTVSPSRERKKCFLVRQASFSGSPEISQGEVGMDQSVKQEQLEHLHAGLRSGWHHGPPAVLPPLQQEDPGKQVAGPCPPLSSGPLHLAQPQIMHMDSQESLRNPLIQPTSYMTSKHLPEQPHLFPHQETIPFSPIQNALFQFQYPTVCMVHLPAQQPPWWQAHFPHPFAQHPQKSYGKPSFQTEIHSSYPLEHVAEHTGKKPAEYAHTKEQTYPCYSGASGLHPKNLLPKFPSDQSSKSTETPSEQVLQEDFASANAGSLQSLPGTVVPVRIQTHVPSYGSVMYTSISQILGQNSPAIVICKVDENMTQRTLVTNAAMQGIGFNIAQVLGQHAGLEKYPIWKAPQTLPLGLESSIPLCLPSTSDSVATLGGSKRMLSPASSLELFMETKQQKRVKEEKMYGQIVEELSAVELTNSDIKKDLSRPQKPQLVRQGCASEPKDGLQSGSSSFSSLSPSSSQDYPSVSPSSREPFLPSKEMLSGSRAPLPGQKSSGPSESKESSDELDIDETASDMSMSPQSSSLPAGDGQLEEEGKGHKRPVGMLVRMASAPSGNVADSTLLLTDMADFQQILQFPSLRTTTTVSWCFLNYTKPNYVQQATFKSSVYASWCISSCNPNPSGLNTKTTLALLRSKQKITAEIYTLAAMHRPGTGKLTSSSAWKQFTQMKPDASFLFGSKLERKLVGNILKERGKGDIHGDKDIGSKQTEPIRIKIFEGGYKSNEDYVYVRGRGRGKYICEECGIRCKKPSMLKKHIRTHTDVRPYVCKLCNFAFKTKGNLTKHMKSKAHMKKCLELGVSMTSVDDTETEEAENLEDLHKAAEKHSMSSISTDHQFSDAEESDGEDGDDNDDDDEDEDDFDDQGDLTPKTRSRSTSPQPPRFSSLPVNVGAVPHGVPSDSSLGHSSLISYLVTLPSIRVTQLMTPSDSCEDTQMTEYQRLFQSKSTDSEPDKDRLDIPSCMDEECMLPSEPSSSPRDFSPSSHHSSPGYDSSPCRDNSPKRYLIPKGDLSPRRHLSPRRDLSPMRHLSPRKEAALRREMSQRDVSPRRHLSPRRPVSPGKDITARRDLSPRRERRYMTTIRAPSPRRALYHNPPLSMGQYLQAEPIVLGPPNLRRGLPQVPYFSLYGDQEGAYEHPGSSLFPEGPNDYVFSHLPLHSQQQVRAPIPMVPVGGIQMVHSMPPALSSLHPSPTLPLPMEGFEEKKGASGESFSKDPYVLSKQHEKRGPHALQSSGPPSTPSSPRLLMKQSTSEDSLNATEREQEENIQTCTKAIASLRIATEEAALLGPDQPARVQEPHQNPLGSAHVSIRHFSRPEPGQPCTSATHPDLHDGEKDNFGTSQTPLAHSTFYSKSCVDDKQLDFHSSKELSSSTEESKDPSSEKSQLH

SEQ ID NO: 444 - protein, 1736 aa, Homo sapiens
MERCSRCHRLLLLLPLVLGLSAAPGWAGAPPVDVLRALRFPSLPDGVRRAKGICPADVAYRVARPAQLSAPTRQLFPGGFPKDFSLLTVVRTRPGLQAPLLTLYSAQGVRQLGLELGRPVRFLYEDQTGRPQPPSQPVFRGLSLADGKWHRVAVAVKGQSVTLIVDCKKRVTRPLPRSARPVLDTHGVIIFGARILDEEVFEGDVQELAIVPGVQAAYESCEQKELECEGGQRERPQNQQPHRAQRSPQQQPSRLHRPQNQEPQSQPTESLYYDYEPPYYDVMTTGTTPDYQDPTPGEEEEILESSLLPPLEEEQTDLQVPPTADRFQAEEYGEGGTDPPEGPYDYTYGYGDDYREETELGPALSAETAHSGAAAHGPRGLKGEKGEPAVLEPGMLVEGPPGPEGPAGLIGPPGIQGNPGPVGDPGERGPPGRAGLPGSDGAPGPPGTSLMLPFRFGSGGGDKGPVVAAQEAQAQAILQQARLALRGPPGPMGYTGRPGPLGQPGSPGLKGESGDLGPQGPRGPQGLTGPPGKAGRRGRAGADGARGMPGDPGVKGDRGFDGLPGLPGEKGHRGDTGAQGLPGPPGEDGERGDDGEIGPRGLPGESGPRGLLGPKGPPGIPGPPGVRGMDGPQGPKGSLGPQGEPGPPGQQGTPGTQGLPGPQGAIGPHGEKGPQGKPGLPGMPGSDGPPGHPGKEGPPGTKGNQGPSGPQGPLGYPGPRGVKGVDGIRGLKGHKGEKGEDGFPGFKGDIGVKGDRGEVGVPGSRGEDGPEGPKGRTGPTGDPGPPGLMGEKGKLGVPGLPGYPGRQGPKGSLGFPGFPGASGEKGARGLSGKSGPRGERGPTGPRGQRGPRGATGKSGAKGTSGGDGPHGPPGERGLPGPQGPNGFPGPKGPPGPPGKDGLPGHPGQRGEVGFQGKTGPPGPPGVVGPQGAAGETGPMGERGHPGPPGPPGEQGLPGTAGKEGTKGDPGPPGAPGKDGPAGLRGFPGERGLPGTAGGPGLKGNEGPSGPPGPAGSPGERGAAGSGGPIGPPGRPGPQGPPGAAGEKGVPGEKGPIGPTGRDGVQGPVGLPGPAGPPGVAGEDGDKGEVGDPGQKGTKGNKGEHGPPGPPGPIGPVGQPGAAGADGEPGARGPQGHFGAKGDEGTRGFNGPPGPIGLQGLPGPSGEKGETGDVGPMGPPGPPGPRGPAGPNGADGPQGPPGGVGNLGPPGEKGEPGESGSPGIQGEPGVKGPRGERGEKGESGQPGEPGPPGPKGPTGDDGPKGNPGPVGFPGDPGPPGEGGPRGQDGAKGDRGEDGEPGQPGSPGPTGENGPPGPLGKRGPAGSPGSEGRQGGKGAKGDPGAIGAPGKTGPVGPAGPAGKPGPDGLRGLPGSVGQQGRPGATGQAGPPGPVGPPGLPGLRGDAGAKGEKGHPGLIGLIGPPGEQGEKGDRGLPGPQGSPGQKGEMGIPGASGPIGPGGPPGLPGPAGPKGAKGATGPGGPKGEKGVQGPPGHPGPPGEVIQPLPIQMPKKTRRSVDGSRLMQEDEAIPTGGAPGSPGGLEEIFGSLDSLREEIEQMRRPTGTQDSPARTCQDLKLCHPELPDGEYWVDPNQGCARDAFRVFCNFTAGGETCVTPRDDVTQFSYVDSEGSPVGVVQLTFLRLLSVSAHQDVSYPCSGAARDGPLRLRGANEDELSPETSPYVKEFRDGCQTQQGRTVLEVRTPVLEQLPVLDASFSDLGAPPRRGGVLLGPVCFMG

SEQ ID NO: 445 - protein, 1979 aa, Homo sapiens
MSSWLGGLGSGLGQSLGQVGGSLASLTGQISNFTKDMLMEGTEEVEAELPDSRTKEIEAIHAILRSENERLKKLCTDLEEKHEASEIQIKQQSTSYRNQLQQKEVEISHLKARQIALQDQLLKLQSAAQSVPSGAGVPATTASSSFAYGISHHPSAFHDDDMDFGDIISSQQEINRLSNEVSRLESEVGHWRHIAQTSKAQGTDNSDQSEICKLQNIIKELKQNRSQEIDDHQHEMSVLQNAHQQKLTEISRRHREELSDYEERIEELENLLQQGGSGVIETDLSKIYEMQKTIQVLQIEKVESTKKMEQLEDKIKDINKKLSSAENDRDILRREQEQLNVEKRQIMEECENLKLECSKLQPSAVKQSDTMTEKERILAQSASVEEVFRLQQALSDAENEIMRLSSLNQDNSLAEDNLKLKMRIEVLEKEKSLLSQEKEELQMSLLKLNNEYEVIKSTATRDISLDSELHDLRLNLEAKEQELNQSISEKETLIAEIEELDRQNQEATKHMILIKDQLSKQQNEGDSIISKLKQDLNDEKKRVHQLEDDKMDITKELDVQKEKLIQSEVALNDLHLTKQKLEDKVENLVDQLNKSQESNVSIQKENLELKEHIRQNEEELSRIRNELMQSLNQDSNSNFKDTLLKEREAEVRNLKQNLSELEQLNENLKKVAFDVKMENEKLVLACEDVRHQLEECLAGNNQLSLEKNTIVETLKMEKGEIEAELCWAKKRLLEEANKYEKTIEELSNARNLNTSALQLEHEHLIKLNQKKDMEIAELKKNIEQMDTDHKETKDVLSSSLEEQKQLTQLINKKEIFIEKLKERSSKLQEELDKYSQALRKNEILRQTIEEKDRSLGSMKEENNHLQEELERLREEQSRTAPVADPKTLDSVTELASEVSQLNTIKEHLEEEIKHHQKIIEDQNQSKMQLLQSLQEQKKEMDEFRYQHEQMNATHTQLFLEKDEEIKSLQKTIEQIKTQLHEERQDIQTDNSDIFQETKVQSLNIENGSEKHDLSKAETERLVKGIKERELEIKLLNEKNISLTKQIDQLSKDEVGKLTQIIQQKDLEIQALHARISSTSHTQDVVYLQQQLQAYAMEREKVFAVLNEKTRENSHLKTEYHKMMDIVAAKEAALIKLQDENKKLSTRFESSGQDMFRETIQNLSRIIREKDIEIDALSQKCQTLLAVLQTSSTGNEAGGVNSNQFEELLQERDKLKQQVKKMEEWKQQVMTTVQNMQHESAQLQEELHQLQAQVLVDSDNNSKLQVDYTGLIQSYEQNETKLKNFGQELAQVQHSIGQLCNTKDLLLGKLDIISPQLSSASLLTPQSAECLRASKSEVLSESSELLQQELEELRKSLQEKDATIRTLQENNHRLSDSIAATSELERKEHEQTDSEIKQLKEKQDVLQKLLKEKDLLIKAKSDQLLSSNENFTNKVNENELLRQAVTNLKERILILEMDIGKLKGENEKIVETYRGKETEYQALQETNMKFSMMLREKEFECHSMKEKALAFEQLLKEKEQGKTGELNQLLNAVKSMQEKTVVFQQERDQVMLALKQKQMENTALQNEVQRLRDKEFRSNQELERLRNHLLESEDSYTREALAAEDREAKLRKKVTVLEEKLVSSSNAMENASHQASVQVESLQEQLNVVSKQRDETALQLSVSQEQVKQYALSLANLQMVLEHFQQEEKAMYSAELEKQKQLIAEWKKNAENLEGKVISLQECLDEANAALDSASRLTEQLDVKEEQIEELKRQNELRQEMLDDVQKKLMSLANSSEGKVDKVLMRNLFIGHFHTPKNQRHEVLRLMGSILGVRREEMEQLFHDDQGGVTRWMTGWLGGGSKSVPNTPLRPNQQSVVNSSFSELFVKFLETESHPSIPPPKLSVHDMKPLDSPGRRKRDTNAPESFKDTAESRSGRRTDVNPFLAPRSAAVPLINPAGLGPGGPGHLLLKPISDVLPTFTPLPALPDNSAGVVLKDLLKQ

SEQ ID NO: 446 - protein, 2459 aa, Homo sapiens
MSAVGLVLLVLALRLRATTVKPEEGSFCSNSQVAFRDACYEFVPLGRTFRDAQSWCEGQGGHLVFIQDEGTQWFLQKHISQDREWWIGLTWNLARNGTTEGPGTWLDTSNVTYSNWHGGQAAAAPDTCGHIGRGPSSEWVTSDCAQTFAFMCEFRVGQSLACEGLNATVHCGLGQVIQVQDAVYGRQNPHFCTQDAGRPSDLEQGCSWANVKEEVAGQCQELQSCQVAADETYFGNLCPTQGSYLWVQYQCREALQLMVSSESFIFDNVTISLTWLLSPYIGNLSCIISTGDSHTFDPYNPPSVSSNVTHQFTSPGEFTVFAECTTSEWHVTAQRQVTVRDKMETLSVTACSGLSQSGAGPLCQAVFGDPLWIQVELDGGTGVTYTVLLGDITLAESTTQKGSLPYNLILDRETQKLMGPGRHRLEIQATGNTTTSTISRNITVHLVELLSGLQASWASDHLELGQDLLITISLAQGTPEELTFEVAGLNATFSHEQVSFGEPFGICRLAVPVEGTFLVTMLVRNAFSNLSLEIGNITITAPSGLQEPSGMNAEGKSKDKGDMEVYIQPGPYVDPFTTVTLGWPDNDKELRFQWSCGSCWALWSSCVERQLLRTDQRELVVPASCLPPPDSAVTLRLAVLRGQELENRAEQCLYVSAPWELRPRVSCERNCRPVNASKDILLRVTMGEDSPVAMFSWYLDNTPTEQAEPLLDACRLRGFWPRSLTLLQSNTSTLLLNSSFLQSRGEVIRIRATALTRHAYGEDTYVISTVPPREVPACTIAPEEGTVLTSFAIFCNASTALGPLEFCFCLESGSCLHCGPEPALPSVYLPLGEENNDFVLTVVISATNRAGDTQQTQAMAKVALGDTCVEDVAFQAAVSEKIPTALQGEGGPEQLLQLAKAVSSMLNQEHESQGSGQSLSIDVRQKVREHVLGSLSAVTTGLEDVQRVQELAEVLREVTCRSKELTPSAQWEASLALQHASEALLTVSAKARPEDQRRQAATRDLFQAVGSVLEASLSNRPEEPAEASSSQIATVLRLLRVMEHVQTTLLLGKLPGGLPAMLATPSISVYTNRIQPWSWQGSSLRPDAADSATFMLPAASSLSSLEGGQEPVDIKIMSFPKSPFPARSHFDVSGTVGGLRVTSPSGQLIPVKNLSENIEILLPRHSQRHSQPTVLNLTSPEALWVNVTSGEATLGIQLHWRPDIALTLSLGYGYHPNKSSYDAQTHLVPMVAPDELPTWILSPQDLRFGEGVYYLTVVPESDLEPAPGRDLTVGITTFLSHCVFWDEVQETWDDSGCQVGPRTSPYQTHCLCNHLTFFGSTFLVMSNAINIHQTAELFATFEDNPVVVTTVGCLCVVYVLVVIWARRKDAQDQAKVKVTVLEDNDPFAQYHYLVTVYTGHRRGAATSSKVTVTLYGLDGEREPHHLADPDTPVFERGAVDAFLLSTLFPLGELRSLRLWHDNSGDRPSWYVSRVLVYDLVMDRKWYFLCNSWLSINVGDCVLDKVFPVATEQDRKQFSHLFFMKTSAGFQDGHIWYSIFSRCARSSFTRVQRVSCCFSLLLCTMLTSIMFWGVPKDPAEQKMDLGKIEFTWQEVMIGLESSILMFPINLLIVQIFQNTRPRVAKEQNTGKWDRGSPNLTPSPQPMEDGLLTPEAVTKDVSRIVSSLFKALKVPSPALGWDSVNLMDINSLLALVEDVIYPQNTSGQVFWEEAKKREDPVTLTLGSSEMKEKSQCPKPKAARSGPWKDSAYRQCLYLQLEHVEQELRLVGPRGFSQPHSHAQALRQLQTLKGGLGVQPGTWAPAHASALQVSKPPQGLPWWCILVGWLLVAATSGVAAFFTMLYGLHYGRASSLRWLISMAVSFVESMFVTQPLKVLGFAAFFALVLKRVDDEEDTVAPLPGHLLGPDPYALFRARRNSSRDVYQPPLTAAIEKMKTTHLKEQKAFALIREILAYLGFLWMLLLVAYGQRDPSAYHLNRHLQHSFTRGFSGVLGFREFFKWANTTLVSNLYGHPPGFITDGNSKLVGSAQIRQVRVQESSCPLAQQPQAYLNGCRAPYSLDAEDMADYGEGWNATTLSEWQYQSQDQRQGYPIWGKLTVYRGGGYVVPLGTDRQSTSRILRYLFDNTWLDALTRAVFVESTVYNANVNLFCIVTLTLETSALGTFFTHAALQSLRLYPFTDGWHPFVVAAELIYFLFLLYYMVVQGKRMSKETWGYFCSKWNLLELAIILASWSALAVFVKRAVLAERDLQRCRNHREEGISFSETAAADAALGYIIAFLVLLSTVKLWHLLRLNPKMNMITAALRRAWGDISGFMIVILTMLLAYSIASNLIFGWKLRSYKTLFDAAETMVSLQLGIFNYEEVLDYSPVLGSFLIGSCIVFMTFVVLNLFISVILVAFSEEQKYYQLSEEGEIVDLLLMKILSFLGIKSKREEPGSSREQPGSLSQTRHSRPAQALPKD

SEQ ID NO: 447 - protein, 3144 aa, Homo sapiens
MTDKSIVILSLMVFHSSFINGKTCRRQLVEEWHPQPSSYVVNWTLTENICLDFYRDCWFLGVNTKIDTSGNQAVPQICPLQIQLGDILVISSEPSLQFPEINLMNVSETSFVGCVQNTTTEDQLLFGCRLKGMHTVNSKWLSVGTHYFITVMASGPSPCPLGLRLNVTVKQQFCQESLSSEFCSGHGKCLSEAWSKTYSCHCQPPFSGKYCQELDACSFKPCKNNGSCINKRENWDEQAYECVCHPPFTGKNCSEIIGQCQPHVCFHGNCSNITSNSFICECDEQFSGPFCEVSAKPCVSLLFWKRGICPNSSSAYTYECPKGSSSQNGETDVSEFSLVPCQNGTDCIKISNDVMCICSPIFTDLLCKSIQTSCESFPLRNNATCKKCEKDYPCSCISGFTEKNCEKAIDHCKLLSINCLNEEWCFNIIGRFKYVCIPGCTKNPCWFLKNVYLIHQHLCYCGVTFHGICQDKGPAQFEYVWQLGFAGSEGEKCQGVIDAYFFLAANCTEDATYVNDPEDNNSSCWFPHEGTKEICANGCSCLSEEDSQEYRYLCFLRWAGNMYLENTTDDQENECQHEAVCKDEINRPRCSCSLSYIGRLCVVNVDYCLGNHSISVHGLCLALSHNCNCSGLQRYERNICEIDTEDCKSASCKNGTTSTHLRGYFFRKCVPGFKGTQCEIDIDECASHPCKNGATCIDQPGNYFCQCVPPFKVVDGFSCLCNPGYVGIRCEQDIDDCILNACEHNSTCKDLHLSYQCVCLSDWEGNFCEQESNECKMNPCKNNSTCTDLYKSYRCECTSGWTGQNCSEEINECDSDPCMNGGLCHESTIPGQFVCLCPPLYTGQFCHQRYNLCDLLHNPCRNNSTCLALVDANQHCICREEFEGKNCEIDVKDCLFLSCQDYGDCEDMVNNFRCICRPGFSGSLCEIEINECSSEPCKNNGTCVDLTNRFFCNCEPEYHGPFCELDVNKCKISPCLDEENCVYRTDGYNCLCAPGYTGINCEINLDECLSEPCLHDGVCIDGINHYTCDCKSGFFGTHCETNANDCLSNPCLHGRCTELINEYPCSCDADGTSTQCKIKINDCTSIPCMNEGFCQKSAHGFTCICPRGYTGAYCEKSIDNCAEPELNSVICLNGGICVDGPGHTFDCRCLPGFSGQFCEININECSSSPCLHGADCEDHINGYVCKCQPGWSGHHCENELECIPNSCVHELCMENEPGSTCLCTPGFMTCSIGLLCGDEIRRITCLTPIFQRTDPISTQTYTIPPSETLVSSFPSIKATRIPAIMDTYPVDQGPKQTGIVKHDILPTTGLATLRISTPLESYLLQELIVTRELSAKHSLLSSADVSSSRFLNFGIRDPAQIVQDKTSVSHMPIRTSAATLGFFFPDRRARTPFIMSSLMSDFIFPTQSLLFENCQTVALSATPTTSVIRSIPGADIELNRQSLLSRGFLLIAASISATPVVSRGAQEDIEEYSADSLISRREHWRLLSPSMSPIFPAKVIISKQVTILNSSALHRFSTKAFNPSEYQAITEASSNQRLTNIKSQAADSLRELSQTCATCSMTEIKSSREFSDQVLHSKQSHFYETFWMNSAILASWYALMGAQTITSGHSFSSATEITPSVAFTEVPSLFPSKKSAKRTILSSSLEESITLSSNLDVNLCLDKTCLSIVPSQTISSDLMNSDLTSKMTTDELSVSENILKLLKIRQYGITMGPTEVLNQESLLDMEKSKGSHTLFKLHPSDSSLDFELNLQIYPDVTLKTYSEITHANDFKNNLPPLTGSVPDFSEVTTNVAFYTVSATPALSIQTSSSMSVIRPDWPYFTDYMTSLKKEVKTSSEWSKWELQPSVQYQEFPTASRHLPFTRSLTLSSLESILAPQRLMISDFSCVRYYGDSYLEFQNVALNPQNNISLEFQTFSSYGLLLYVKQDSNLVDGFFIQLFIENGTLKYHFYCPGEAKFKSINTTVRVDNGQKYTLLIRQELDPCNAELTILGRNTQICESINHVLGKPLPKSGSVFIGGFPDLHGKIQMPVPVKNFTGCIEVIEINNWRSFIPSKAVKNYHINNCRSQGFMLSPTASFVDASDVTQGVDTMWTSVSPSVAAPSVCQQDVCHNGGTCHAIFLSSGIVSFQCDCPLHFTGRFCEKDAGLFFPSFNGNSYLELPFLKFVLEKEHNRTVTIYLTIKTNSLNGTILYSNGNNCGKQFLHLFLVEGRPSVKYGCGNSQNILTVSANYSINTNAFTPITIRYTTPVGSPGVVCMIEMTADGKPPVQKKDTEISHASQAYFESMFLGHIPANVQIHKKAGPVYGFRGCILDLQVNNKEFFIIDEARHGKNIENCHVPWCAHHLCRNNGTCISDNENLFCECPRLYSGKLCQFASCENNPCGNGATCVPKSGTDIVCLCPYGRSGPLCTDAINITQPRFSGTDAFGYTSFLAYSRISDISFHYEFHLKFQLANNHSALQNNLIFFTGQKGHGLNGDDFLAVGLLNGSVVYSYNLGSGIASIRSEPLNLSLGVHTVHLGKFFQEGWLKVDDHKNKSIIAPGRLVGLNVFSQFYVGGYSEYTPDLLPNGADFKNGFQGCIFTLQVRTEKDGHFRGLGNPEGHPNAGRSVGQCHASPCSLMKCGNGGTCIESGTSVYCNCTTGWKGSFCTETVSTCDPEHDPPHHCSRGATCISLPHGYTCFCPLGTTGIYCEQALSISDPSFRSNELSWMSFASFHVRKKTHIQLQFQPLAADGILFYAAQHLKAQSGDFLCISLVNSSVQLRYNLGDRTIILETLQKVTINGSTWHIIKAGRVGAEGYLDLDGINVTEKASTKMSSLDTNTDFYIGGVSSLNLVNPMAIENEPVGFQGCIRQVIINNQELQLTEFGAKGGSNVGDCDGTACGYNTCRNGGECTVNGTTFSCRCLPDWAGNTCNQSVSCLNNLCLHQSLCIPDQSFSYSCLCTLGWVGRYCENKTSFSTAKFMGNSYIKYIDPNYRMRNLQFTTISLNFSTTKTEGLIVWMGIAQNEENDFLAIGLHNQTLKIAVNLGERISVPMSYNNGTFCCNKWHHVVVIQNQTLIKAYINNSLILSEDIDPHKNFVALNYDGICYLGGFEYGRKVNIVTQEIFKTNFVGKIKDVVFFQEPKNIELIKLEGYNVYDGDEQNEVT

SEQ ID NO: 448 - protein, 1019 aa, Homo sapiens
MLQGTCSVLLLWGILGAIQAQQQEVISPDTTERNNNCPEKTDCPIHVYFVLDTSESVTMQSPTDILLFHMKQFVPQFISQLQNEFYLDQVALSWRYGGLHFSDQVEVFSPPGSDRASFIKNLQGISSFRRGTFTDCALANMTEQIRQDRSKGTVHFAVVITDGHVTGSPCGGIKLQAERAREEGIRLFAVAPNQNLKEQGLRDIASTPHELYRNDYATMLPDSTEIDQDTINRIIKVMKHEAYGECYKVSCLEIPGPSGPKGYRGQKGAKGNMGEPGEPGQKGRQGDPGIEGPIGFPGPKGVPGFKGEKGEFGADGRKGAPGLAGKNGTDGQKGKLGRIGPPGCKGDPGNRGPDGYPGEAGSPGERGDQGGKGDPGRPGRRGPPGEIGAKGSKGYQGNSGAPGSPGVKGAKGGPGPRGPKGEPGRRGDPGTKGSPGSDGPKGEKGDPGPEGPRGLAGEVGNKGAKGDRGLPGPRGPQGALGEPGKQGSRGDPGDAGPRGDSGQPGPKGDPGRPGFSYPGPRGAPGEKGEPGPRGPEGGRGDFGLKGEPGRKGEKGEPADPGPPGEPGPRGPRGVPGPEGEPGPPGDPGLTECDVMTYVRETCGCCDCEKRCGALDVVFVIDSSESIGYTNFTLEKNFVINVVNRLGAIAKDPKSETGTRVGVVQYSHEGTFEAIQLDDERIDSLSSFKEAVKNLEWIAGGTWTPSALKFAYDRLIKESRRQKTRVFAVVITDGRHDPRDDDLNLRALCDRDVTVTAIGIGDMFHEKHESENLYSIACDKPQQVRNMTLFSDLVAEKFIDDMEDVLCPDPQIVCPDLPCQTELSVAQCTQRPVDIVFLLDGSERLGEQNFHKARRFVEQVARRLTLARRDDDPLNARVALLQFGGPGEQQVAFPLSHNLTAIHEALETTQYLNSFSHVGAGVVHAINAIVRSPRGGARRHAELSFVFLTDGVTGNDSLHESAHSMRKQNVVPTVLALGSDVDMDVLTTLSLGDRAAVFHEKDYDSLAQPGFFDRFIRWIC

SEQ ID NO: 449 - protein, 1353 aa, Homo sapiens
MASPPHQQLLHHHSTEVSCDSSGDSNSVRVKINPKQLSSNSHPKHCKYSISSSCSSSGDSGGVPRRVGGGGRLRRQKKLPQLFERASSRWWDPKFDSVNLEEACLERCFPQTQRRFRYALFYIGFACLLWSIYFAVHMRSRLIVMVAPALCFLLVCVGFFLFTFTKLYARHYAWTSLALTLLVFALTLAAQFQVLTPVSGRGDSSNLTATARPTDTCLSQVGSFSMCIEVLFLLYTVMHLPLYLSLCLGVAYSVLFETFGYHFRDEACFPSPGAGALHWELLSRGLLHGCIHAIGVHLFVMSQVRSRSTFLKVGQSIMHGKDLEVEKALKERMIHSVMPRIIADDLMKQGDEESENSVKRHATSSPKNRKKKSSIQKAPIAFRPFKMQQIEEVSILFADIVGFTKMSANKSAHALVGLLNDLFGRFDRLCEETKCEKISTLGDCYYCVAGCPEPRADHAYCCIEMGLGMIKAIEQFCQEKKEMVNMRVGVHTGTVLCGILGMRRFKFDVWSNDVNLANLMEQLGVAGKVHISEATAKYLDDRYEMEDGKVIERLGQSVVADQLKGLKTYLISGQRAKESRCSCAEALLSGFEVIDGSQVSSGPRGQGTASSGNVSDLAQTVKTFDNLKTCPSCGITFAPKSEAGAEGGAPQNGCQDEHKNSTKASGGPNPKTQNGLLSPPQEEKLTNSQTSLCEILQEKGRWAGVSLDQSALLPLRFKNIREKTDAHFVDVIKEDSLMKDYFFKPPINQFSLNFLDQELERSYRTSYQEEVIKNSPVKTFASPTFSSLLDVFLSTTVFLTLSTTCFLKYEAATVPPPPAALAVFSAALLLEVLSLAVSIRMVFFLEDVMACTKRLLEWIAGWLPRHCIGAILVSLPALAVYSHVTSEYETNIHFPVFTGSAALIAVVHYCNFCQLSSWMRSSLATVVGAGPLLLLYVSLCPDSSVLTSPLDAVQNFSSERNPCNSSVPRDLRRPASLIGQEVVLVFFLLLLLVWFLNREFEVSYRLHYHGDVEADLHRTKIQSMRDQADWLLRNIIPYHVAEQLKVSQTYSKNHDSGGVIFASIVNFSEFYEENYEGGKECYRVLNELIGDFDELLSKPDYSSIEKIKTIGATYMAASGLNTAQAQDGSHPQEHLQILFEFAKEMMRVVDDFNNNMLWFNFKLRVGFNHGPLTAGVIGTTKLLYDIWGDTVNIASRMDTTGVECRIQVSEESYRVLSKMGYDFDYRGTVNVKGKGQMKTYLYPKCTDHRVIPQHQLSISPDIRVQVDGSIGRSPTDEIANLVPSVQYVDKTSLGSDSSTQAKDAHLSPKRPWKEPVKAEERGRFGKAIEKDDCDETGIEEANELTKLNVSKSV

SEQ ID NO: 450 - protein, 2063 aa, Homo sapiens
MADGAPRPQLYRSVSFKLLERWSGGPGLREEDTDTPGLRRRASCRPTTAARGQPSRRVSKLASGPLAAPAQPRPLRSLSPSVRQLSRRFDAPRLDDGSAGTRDGGVLPAAAEEAAEGPARGAWPSVTEMRKLFGGPGSRRPSADSESPGTPSPDGAAWEPPARESRQPPTPPPRTCFPLAGLRSARPLTGPETEGRLRRPQQQQERAQRPADGLHSWHIFSQPQAGARASCSSSSIAASYPVSRSRAASSSEEEEEGPPQLPGAQSPAYHGGHSSGSDDDRDGEGGHRWGGRPGLRPGSSLLDQDCRPDSDGLNLSSMNSAGVSGSPEPPTSPRAPREEGLREWGSGSPPCVPGPQEGLRPMSDSVGGAFRVAKVSFPSYLASPAGSRGSSRYSSTETLKDDDLWSSRGSGGWGVYRSPSFGAGEGLLRSQARTRAKGPGGTSRALRDGGFEPEKSRQRKSLSNPDIASETLTLLSFLRSDLSELRVRKPGGSSGDRGSNPLDGRDSPSAGGPVGQLEPIPIPAPASPGTRPTLKDLTATLRRAKSFTCSEKPMARRLPRTSALKSSSSELLLTGPGAEEDPLPLIVQDQYVQEARQVFEKIQRMGAQQDDGSDAPPGSPDWAGDVTRGQRSQEELSGPESSLTDEGIGADPEPPVAAFCGLGTTGMWRPLSSSSAQTNHHGPGTEDSLGGWALVSPETPPTPGALRRRRKVPPSGSGGSELSNGEAGEAYRSLSDPIPQRHRAATSEEPTGFSVDSNLLGSLSPKTGLPATSAMDEGLTSGHSDWSVGSEESKGYQEVIQSIVQGPGTLGRVVDDRIAGKAPKKKSLSDPSRRGELAGPGFEGPGGEPIREVEPMLPPSSSEPILVEQRAEPEEPGATRSRAQSERALPEALPPPATAHRNFHLDPKLADILSPRLIRRGSKKRPARSSHQELRRDEGSQDQTGSLSRARPSSRHVRHASVPATFMPIVVPEPPTSVGPPVAVPEPIGFPTRAHPTLQAPSLEDVTKQYMLNLHSGEVPAPVPVDMPCLPLAAPPSAEAKPPEAARPADEPTPASKCCSKPQVDMRKHVAMTLLDTEQSYVESLRTLMQGYMQPLKQPENSVLCDPSLVDEIFDQIPELLEHHEQFLEQVRHCMQTWHAQQKVGALLVQSFSKDVLVNIYSAYIDNFLNAKDAVRVAKEARPAFLKFLEQSMRENKEKQALSDLMIKPVQRIPRYELLVKDLLKHTPEDHPDHPLLLEAQRNIKQVAERINKGVRSAEEAERHARVLQEIEAHIEGMEDLQAPLRRFLRQEMVIEVKAIGGKKDRSLFLFTDLIVCTTLKRKSGSLRRSSMSLYTAASVIDTASKYKMLWKLPLEDADIIKGASQATNRENIQKAISRLDEDLTTLGQMSKLSESLGFPHQSLDDALRDLSAAMHRDLSEKQALCYALSFPPTKLELCATRPEGTDSYIFEFPHPDARLGFEQAFDEAKRKLASSKSCLDPEFLKAIPIMKTRSGMQFSCAAPTLNSCPEPSPEVWVCNSDGYVGQVCLLSLRAEPDVEACIAVCSARILCIGAVPGLQPRCHREPPPSLRSPPETAPEPAGPELDVEAAADEEAATLAEPGPQPCLHISIAGSGLEMTPGLGEGDPRPELVPFDSDSDDESSPSPSGTLQSQASRSTISSSFGNEETPSSKEATAETTSSEEEQEPGFLPLSGSFGPGGPCGTSPMDGRALRRSSHGSFTRGSLEDLLSVDPEAYQSSVWLGTEDGCVHVYQSSDSIRDRRNSMKLQHAASVTCILYLNNQVFVSLANGELVVYQREAGHFWDPQNFKSVTLGTQGSPITKMVSVGGRLWCGCQNRVLVLSPDTLQLEHMFYVGQDSSRCVACMVDSSLGVWVTLKGSAHVCLYHPDTFEQLAEVDVTPPVHRMLAGSDAIIRQHKAACLRITALLVCEELLWVGTSAGVVLTMPTSPGTVSCPRAPLSPTGLGQGHTGHVRFLAAVQLPDGFNLLCPTPPPPPDTGPEKLPSLEHRDSPWHRGPAPARPKMLVISGGDGYEDFRLSSGGGSSSETVGRDDSTNHLLLWRV

SEQ ID NO: 451 - protein, 2135 aa, Homo sapiens
MPALGPALLQALWAGWVLTLQPLPPTAFTPNGTYLQHLARDPTSGTLYLGATNFLFQLSPGLQLEATVSTGPVLDSRDCLPPVMPDECPQAQPTNNPNQLLLVSPGALVVCGSVHQGVCEQRRLGQLEQLLLRPERPGDTQYVAANDPAVSTVGLVAQGLAGEPLLFVGRGYTSRGVGGGIPPITTRALWPPDPQAAFSYEETAKLAVGRLSEYSHHFVSAFARGASAYFLFLRRDLQAQSRAFRAYVSRVCLRDQHYYSYVELPLACEGGRYGLIQAAAVATSREVAHGEVLFAAFSSAAPPTVGRPPSAAAGASGASALCAFPLDEVDRLANRTRDACYTREGRAEDGTEVAYIEYDVNSDCAQLPVDTLDAYPCGSDHTPSPMASRVPLEATPILEWPGIQLTAVAVTMEDGHTIAFLGDSQGQLHRVYLGPGSDGHPYSTQSIQQGSAVSRDLTFDGTFEHLYVMTQSTLLKVPVASCAQHLDCASCLAHRDPYCGWCVLLGRCSRRSECSRGQGPEQWLWSFQPELGCLQVAAMSPANISREETREVFLSVPDLPPLWPGESYSCHFGEHQSPALLTGSGVMCPSPDPSEAPVLPRGADYVSVSVELRFGAVVIAKTSLSFYDCVAVTELRPSAQCQACVSSRWGCNWCVWQHLCTHKASCDAGPMVASHQSPLVSPDPPARGGPSPSPPTAPKALATPAPDTLPVEPGAPSTATASDISPGASPSLLSPWGPWAGSGSISSPGSTGSPLHEEPSPPSPQNGPGTAVPAPTDFRPSATPEDLLASPLSPSEVAAVPPADPGPEALHPTVPLDLPPATVPATTFPGAMGSVKPALDWLTREGGELPEADEWTGGDAPAFSTSTLLSGDGDSAELEGPPAPLILPSSLDYQYDTPGLWELEEATLGASSCPCVESVQGSTLMPVHVEREIRLLGRNLHLFQDGPGDNECVMELEGLEVVVEARVECEPPPDTQCHVTCQQHQLSYEALQPELRVGLFLRRAGRLRVDSAEGLHVVLYDCSVGHGDCSRCQTAMPQYGCVWCEGERPRCVTREACGEAEAVATQCPAPLIHSVEPLTGPVDGGTRVTIRGSNLGQHVQDVLGMVTVAGVPCAVDAQEYEVSSSLVCITGASGEEVAGATAVEVPGRGRGVSEHDFAYQDPKVHSIFPARGPRAGGTRLTLNGSKLLTGRLEDIRVVVGDQPCHLLPEQQSEQLRCETSPRPTPATLPVAVWFGATERRLQRGQFKYTLDPNITSAGPTKSFLSGGREICVRGQNLDVVQTPRIRVTVVSRMLQPSQGLGRRRRVVPETACSLGPSCSSQQFEEPCHVNSSQLITCRTPALPGLPEDPWVRVEFILDNLVFDFATLNPTPFSYEADPTLQPLNPEDPTMPFRHKPGSVFSVEGENLDLAMSKEEVVAMIGDGPCVVKTLTRHHLYCEPPVEQPLPRHHALREAPDSLPEFTVQMGNLRFSLGHVQYDGESPGAFPVAAQVGLGVGTSLLALGVIIIVLMYRRKSKQALRDYKKVQIQLENLESSVRDRCKKEFTDLMTEMTDLTSDLLGSGIPFLDYKVYAERIFFPGHRESPLHRDLGVPESRRPTVEQGLGQLSNLLNSKLFLTKFIHTLESQRTFSARDRAYVASLLTVALHGKLEYFTDILRTLLSDLVAQYVAKNPKLMLRRTETVVEKLLTNWMSICLYTFVRDSVGEPLYMLFRGIKHQVDKGPVDSVTGKAKYTLNDNRLLREDVEYRPLTLNALLAVGPGAGEAQGVPVKVLDCDTISQAKEKMLDQLYKGVPLTQRPDPRTLDVEWRSGVAGHLILSDEDVTSEVQGLWRRLNTLQHYKVPDGATVALVPCLTKHVLRENQDYVPGERTPMLEDVDEGGIRPWHLVKPSDEPEPPRPRRGSLRGGERERAKAIPEIYLTRLLSMKGTLQKFVDDLFQVILSTSRPVPLAVKYFFDLLDEQAQQHGISDQDTIHIWKTNSLPLRFWINIIKNPQFVFDVQTSDNMDAVLLVIAQTFMDACTLADHKLGRDSPINKLLYARDIPRYKRMVERYYADIRQTVPASDQEMNSVLAELSWNYSGDLGARVALHELYKYINKYYDQIITALEEDGTAQKMQLGYRLQQIAAAVENKVTDL

SEQ ID NO: 452 - protein, 2172 aa, Homo sapiens
MWGLLIWTLLALHQIRAARAQDDVSPYFKTEPVRTQVHLEGNRLVLTCMAEGSWPLEFKWLHNNRELTKFSLEYRYMITSLDRTHAGFYRCIVRNRMGALLQRQTEVQVAYMGSFEEGEKHQSVSHGEAAVIRAPRIASFPQPQVTWFRDGRKIPPSSRIAITLENTLVILSTVAPDAGRYYVQAVNDKNGDNKTSQPITLTVENVGGPADPIAPTIIIPPKNTSVVAGTSEVTLECVANARPLIKLHIIWKKDGVLLSGGISDHNRRLTIPNPTGSDAGYYECEAVLRSSSVPSVVRGAYLSVLEPPQFVKEPERHITAEMEKVVDIPCQAKGVPPPSITWYKDAAVVEVEKLTRFRQRNDGGLQISGLVPDDTGMFQCFARNAAGEVQTSTYLAVTSIAPNITRGPLDSTVIDGMSVVLACETSGAPRPAITWQKGERILASGSVQLPRFTPLESGSLLISPTHISDAGTYTCLATNSRGVDEASADLVVWARTRITKPPQDQSVIKGTQASMVCGVTHDPRVTIRYIWEKDGATLGTESHPRIRLDRNGSLHISQTWSGDIGTYTCRVISAGGNDSRSAHLRVRQLPHAPEHPVATLSTVERRAINLTWTKPFDGNSPLIRYILEMSENNAPWTVLLASVDPKATSVTVKGLVPARSYQFRLCAVNDVGKGQFSKDTERVSLPEEPPTAPPQNVIASGRTNQSIMIQWQPPPESHQNGILKGYIIRYCLAGLPVGYQFKNITDADVNNLLLEDLIIWTNYEIEVAAYNSAGLGVYSSKVTEWTLQGVPTVPPGNVHAEATNSTTIRFTWNAPSPQFINGINQGYKLIAWEPEQEEEVTMVTARPNFQDSIHVGFVSGLKKFTEYFTSVLCFTTPGDGPRSTPQLVRTHEDVPGPVGHLSFSEILDTSLKVSWQEPGEKNGILTGYRISWEEYNRTNTRVTHYLPNVTLEYRVTGLTALTTYTIEVAAMTSKGQGQVSASTISSGVPPELPGPPTNLGISNIGPRSVTLQFRPGYDGKTSISRWLVEAQVGVVGEGEEWLLIHQLSNEPDARSMEVPDLNPFTCYSFRMRQVNIVGTSPPSQPSRKIQTLQAPPDMAPANVSLRTASETSLWLRWMPLPEMEYNGNPESVGYKIKYSRSDGHGKTLSHVVQDRVERDYTIEDLEEWTEYRVQVQAFNAIGSGPWSQTVVGRTRESVPSSGPTNVSALATTSSSMLVRWSEVPEADRNGLVLGYKVMYKEKDSDTQPRFWLVEGNSSRSAQLTGLGKYVLYEVQVLAFTRIGDGSPSHPPILERTLDDVPGPPMGILFPEVRTTSVRLIWQPPAAPNGIILAYQITHRLNTTTANTATVEVLAPSARQYTATGLKPESVYLFRITAQTRKGWGEAAEALVVTTEKRDRPQPPSRPMVQQEDVRARSVLLSWEPGSDGLSPVRYYTIQTRELPSGRWALHSASVSHNASSFIVDRLKPFTSYKFRVKATNDIGDSEFSEESESLTTLQAAPDEAPTILSVTPHTTTSVLIRWQPPAEDKINGILLGFRIRYRELLYEGLRGFTLRGINNPGATWAELTSMYSMRNLSRPSLTQYELDNLNKHRRYEIRMSVYNAVGEGPSSPPQEVFVGEAVPTAAPRNVVVHGATATQLDVTWEPPPLDSQNGDIQGYKIYFWEAQRGNLTERVKTLFLAENSVKLKNLTGYTAYMVSVAAFNAAGDGPRSTPTQGQTQQAAPSAPSSVKFSELTTTSVNVSWEAPQFPNGILEGYRLVYEPCSPVDGVSKIVTVDVKGNSPLWLKVKDLAEGVTYRFRIRAKTFTYGPEIEANVTTGPGEGAPGPPGVPIIVRYSSAIAIHWSSGDPGKGPITRYVIEARPSDEGLWDILIKDIPKEVSSYTFSMDILKPGVSYDFRVIAVNDYGFGTPSSPSQSVPAQKANPFYEEWWFLVVIALVGLIFILLLVFVLIIRGQSKKYAKKTDSGNSAKSGALGHSEMMSLDESSFPALELNNRRLSVKNSFCRKNGLYTRSPPRPSPGSLHYSDEDVTKYNDLIPAESSSLTEKPSEISDSQGSDSEYEVDSNHQKAHSFVNHYISDPTYYNSWRRQQKGISRAQAYSYTESDSGEPDHTTVTNSTSTQQGSLFRPKASRTPTPQNPPNPPSQQSTLYRPPSSLAPGSRAPIAGFSSFV

SEQ ID NO: 453 - protein, 1235 aa, Homo sapiens
MAHLELLLVENFKSWRGRQVIGPFRRFTCIIGPNGSGKSNVMDALSFVMGEKIANLRVKNIQELIHGAHIGKPISSSASVKIIYVEESGEEKTFARIIRGGCSEFRFNDNLVSRSVYIAELEKIGIIVKAQNCLVFQGTVESISVKKPKERTQFFEEISTSGELIGEYEEKKRKLQKAEEDAQFNFNKKKNIAAERRQAKLEKEEAERYQSLLEELKMNKIQLQLFQLYHNEKKIHLLNTKLEHVNRDLSVKRESLSHHENIVKARKKEHGMLTRQLQQTEKELKSVETLLNQKRPQYIKAKENTSHHLKKLDVAKKSIKDSEKQCSKQEDDIKALETELADLDAAWRSFEKQIEEEILHKKRDIELEASQLDRYKELKEQVRKKVATMTQQLEKLQWEQKTDEERLAFEKRRHGEVQGNLKQIKEQIEDHKKRIEKLEEYTKTCMDCLKEKKQQEETLVDEIEKTKSRMSEFNEELNLIRSELQNAGIDTHEGKRQQKRAEVLEHLKRLYPDSVFGRLFDLCHPIHKKYQLAVTKVFGRFITAIVVASEKVAKDCIRFLKEERAEPETFLALDYLDIKPINERLRELKGCKMVIDVIKTQFPQLKKVIQFVCGNGLVCETMEEARHIALSGPERQKTVALDGTLFLKSGVISGGSSDLKYKARCWDEKELKNLRDRRSQKIQELKGLMKTLRKETDLKQIQTLIQGTQTRLKYSQNELEMIKKKHLVAFYQEQSQLQSELLNIESQCIMLSEGIKERQRRIKEFQEKIDKVEDDIFQHFCEEIGVENIREFENKHVKRQQEIDQKRLEFEKQKTRLNVQLEYSRSHLKKKLNKINTLKETIQKGSEDIDHLKKAEENCLQTVNELMAKQQQLKDIRVTQNSSAEKVQTQIEEERKKFLAVDREVGKLQKEVVSIQTSLEQKRLEKHNLLLDCKVQDIEIILLSGSLDDIIEVEMGTEAESTQATIDIYEKEEAFEIDYSSLKEDLKALQSDQEIEAHLRLLLQQVASQEDILLKTAAPNLRALENLKTVRDKFQESTDAFEASRKEARLCRQEFEQVKKRRYDLFTQCFEHVSISIDQIYKKLCRNNSAQAFLSPENPEEPYLEGISYNCVAPGKRFMPMDNLSGGEKCVAALALLFAVHSFRPAPFFVLDEVDAALDNTNIGKVSSYIKEQTQDQFQMIVISLKEEFYSRADALIGIYPEYDDCMFSRVLTLDLSQYPDTEGQESSKRHGESR

SEQ ID NO: 454 - protein, 3123 aa, Homo sapiens
MHHGTGPQNVQHQLQRSRACPGSEGEEQPAHPNPPPSPAAPFAPSASPSAPQSPSYQIQQLMNRSPATGQNVNITLQSVGPVVGGNQQITLAPLPLPSPTSPGFQFSAQPRRFEHGSPSYIQVTSPLSQQVQTQSPTQPSPGPGQALQNVRAGAPGPGLGLCSSSPTGGFVDASVLVRQISLSPSSGGHFVFQDGSGLTQIAQGAQVQLQHPGTPITVRERRPSQPHTQSGGTIHHLGPQSPAAAGGAGLQPLASPSHITTANLPPQISSIIQGQLVQQQQVLQGPPLPRPLGFERTPGVLLPGAGGAAGFGMTSPPPPTSPSRTAVPPGLSSLPLTSVGNTGMKKVPKKLEEIPPASPEMAQMRKQCLDYHYQEMQALKEVFKEYLIELFFLQHFQGNMMDFLAFKKKHYAPLQAYLRQNDLDIEEEEEEEEEEEEKSEVINDEQQALAGSLVAGAGSTVETDLFKRQQAMPSTGMAEQSKRPRLEVGHQGVVFQHPGADAGVPLQQLMPTAQGGMPPTPQAAQLAGQRQSQQQYDPSTGPPVQNAASLHTPLPQLPGRLPPAGVPTAALSSALQFAQQPQVVEAQTQLQIPVKTQQPNVPIPAPPSSQLPIPPSQPAQLALHVPTPGKVQVQASQLSSLPQMVASTRLPVDPAPPCPRPLPTSSTSSLAPVSGSGPGPSPARSSPVNRPSSATNKALSPVTSRTPGVVASAPTKPQSPAQNATSSQDSSQDTLTEQITLENQVHQRIAELRKAGLWSQRRLPKLQEAPRPKSHWDYLLEEMQWMATDFAQERRWKVAAAKKLVRTVVRHHEEKQLREERGKKEEQSRLRRIAASTAREIECFWSNIEQVVEIKLRVELEEKRKKALNLQKVSRRGKELRPKGFDALQESSLDSGMSGRKRKASISLTDDEVDDEEETIEEEEANEGVVDHQTELSNLAKEAELPLLDLMKLYEGAFLPSSQWPRPKPDGEDTSGEEDADDCPGDRESRKDLVLIDSLFIMDQFKAAERMNIGKPNAKDIADVTAVAEAILPKGSARVTTSVKFNAPSLLYGALRDYQKIGLDWLAKLYRKNLNGILADEAGLGKTVQIIAFFAHLACNEGNWGPHLVVVRSCNILKWELELKRWCPGLKILSYIGSHRELKAKRQEWAEPNSFHVCITSYTQFFRGLTAFTRVRWKCLVIDEMQRVKGMTERHWEAVFTLQSQQRLLLIDSPLHNTFLELWTMVHFLVPGISRPYLSSPLRAPSEESQDYYHKVVIRLHRVTQPFILRRTKRDVEKQLTKKYEHVLKCRLSNRQKALYEDVILQPGTQEALKSGHFVNVLSILVRLQRICNHPGLVEPRHPGSSYVAGPLEYPSASLILKALERDFWKEADLSMFDLIGLENKITRHEAELLSKKKIPRKLMEEISTSAAPAARPAAAKLKASRLFQPVQYGQKPEGRTVAFPSTHPPRTAAPTTASAAPQGPLRGRPPIATFSANPEAKAAAAPFQTSQASASAPRHQPASASSTAASPAHPAKLRAQTTAQASTPGQPPPQPQAPSHAAGQSALPQRLVLPSQAQARLPSGEVVKIAQLASITGPQSRVAQPETPVTLQFQGSKFTLSHSQLRQLTAGQPLQLQGSVLQIVSAPGQPYLRAPGPVVMQTVSQAGAVHGALGSKPPAGGPSPAPLTPQVGVPGRVAVNALAVGEPGTASKPASPIGGPTQEEKTRLLKERLDQIYLVNERRCSQAPVYGRDLLRICALPSHGRVQWRGSLDGRRGKEAGPAHSYTSSSESPSELMLTLCRCGESLQDVIDRVAFVIPPVVAAPPSLRVPRPPPLYSHRMRILRQGLREHAAPYFQQLRQTTAPRLLQFPELRLVQFDSGKLEALAILLQKLKSEGRRVLILSQMILMLDILEMFLNFHYLTYVRIDENASSEQRQELMRSFNRDRRIFCAILSTHSRTTGINLVEADTVVFYDNDLNPVMDAKAQEWCDRIGRCKDIHIYRLVSGNSIEEKLLKNGTKDLIREVAAQGNDYSMAFLTQRTIQELFEVYSPMDDAGFPVKAEEFVVLSQEPSVTETIAPKIARPFIEALKSIEYLEEDAQKSAQEGVLGPHTDALSSDSENMPCDEEPSQLEELADFMEQLTPIEKYALNYLELFHTSIEQEKERNSEDAVMTAVRAWEFWNLKTLQEREARLRLEQEEAELLTYTREDAYSMEYVYEDVDGQTEVMPLWTPPTPPQDDSDIYLDSVMCLMYEATPIPEAKLPPVYVRKERKRHKTDPSAAGRKKKQRHGEAVVPPRSLFDRATPGLLKIRREGKEQKKNILLKQQVPFAKPLPTFAKPTAEPGQDNPEWLISEDWALLQAVKQLLELPLNLTIVSPAHTPNWDLVSDVVNSCSRIYRSSKQCRNRYENVIIPREEGKSKNNRPLRTSQIYAQDENATHTQLYTSHFDLMKMTAGKRSPPIKPLLGMNPFQKNPKHASVLAESGINYDKPLPPIQVASLRAERIAKEKKALADQQKAQQPAVAQPPPPQPQPPPPPQQPPPPLPQPQAAGSQPPAGPPAVQPQPQPQPQTQPQPVQAPAKAQPAITTGGSAAVLAGTIKTSVTGTSMPTGAVSGNVIVNTIAGVPAATFQSINKRLASPVAPGALTTPGGSAPAQVVHTQPPPRAVGSPATATPDLVSMATTQGVRAVTSVTASAVVTTNLTPVQTPARSLVPQVSQATGVQLPGKTITPAHFQLLRQQQQQQQQQQQQQQQQQQQQQQQQQQQQQTTTTSQVQVPQIQGQAQSPAQIKAVGKLTPEHLIKMQKQKLQMPPQPPPPQAQSAPPQPTAQVQVQTSQPPQQQSPQLTTVTAPRPGALLTGTTVANLQVARLTRVPTSQLQAQGQMQTQAPQPAQVALAKPPVVSVPAAVVSSPGVTTLPMNVAGISVAIGQPQKAAGQTVVAQPVHMQQLLKLKQQAVQQQKAIQPQAAQGPAAVQQKITAQQITTPGAQQKVAYAAQPALKTQFLTTPISQAQKLAGAQQVQTQIQVAKLPQVVQQQTPVASIQQVASASQQASPQTVALTQATAAGQQVQMIPAVTATAQVVQQKLIQQQVVTTASAPLQTPGAPNPAQVPASSDSPSQQPKLQMRVPAVRLKTPTKPPCQ

SEQ ID NO: 455 - protein, 2248 aa, Homo sapiens
MMDSENKPENDEDEKINKEAQDLTKLSSHNEDGGPVSDVIASFPENSMGKRGFSESSNSDSVVIGEDRNKHASKRRKLDEAEPLKSGKQGICRLETSESSVTEGGIALDETGKETFLSDCTVGGTCLPNALSPSCNFSTIDVVSLKTDTEKTSAQEMVSLDLERESPFPPKEISVSCTIGNVDTVLKCSICGHLFSSCSDLEKHAESHMQQPKEHTCCHCSHKAESSSALHMHIKQAHGPQKVFSCDLCGFQCSEENLLNAHYLGKTHLRRQNLAARGGFVQILTKQPFPKKSRTMATKNVHSKPRTSKSIAKNSDSKGLRNVGSTFKDFRGSISKQSGSSSELLVEMMPSRNTLSQEVEIVEEHVTSLGLAQNPENQSRKLDTLVTSEGLLEKLESTKNTLQAAHGNSVTSRPRPERNILVLGNSFRRRSSTFTLKGQAKKRFNLLGIKRGTSETQRMYMKHLRTQMKTHDAESVLKHLEACSSVQRVCVTTSETQEAEQGQGSARPPDSGLHSLTVKPASGSQTLCACTDCGQVATNRTDLEIHVKRCHAREMKFYCRTCDFSSMSRRDLDEHLHSNQHQQTASVLSCQCCSFISLDEINLRDHMKEKHNMHFLCTPCNLFFLSEKDVEEHKATEKHINSLVQPKTLQSSNSDLVLQTLPLSTLESENAKESMDDSGKASQEEPLKSRVSHGNEVRHSSKPQFQCKKCFYKTRSSTVLTRHIKLRHGQDYHFLCKACNLYSLSKEGMEKHIKRSKHLENAKKNNIGLSFEECIERVCIGANDKKEEFDVSGNGRIEGHIGVQLQEHSYLEKGMLASEELSQSGGSTKDDELASTTTPKRGRPKGNISRTCSHCGLLASSITNLTVHIRRKHSHQYSYLCKVCKYYTVTKGDMERHCATKKHKGRVEIEASGKHSSDIIVGPEGGSLEAGKKNAGSAVTMSDEHANKPAESPTSVLEKPDRGNSIEAEVENVFHSLDGEVNSHLLDKKEQISSEPEDFAQPGDVYSQRDVTGTGENKCLHCEFSAHSSASLELHVKRKHTKEFEFYCMACDYYAVTRREMTRHAATEKHKMKRQSYLNSANVEAGSADMSKNIIMPEEEHQQNSEEFQIISGQPSDTLKSRNAADCSILNENTNLDMSKVLCAADSVEVETEEESNFNEDHSFCETFQQAPVKDKVRKPEEMMSLTMSSNYGSPSRFQNENSGSSALNCETAKKNHEISNDAGELRVHCEGEGGNAGDGGGVVPHRHLCPVTLDGERSAESPVLVVTRITREQGNLESGGQNRVARGHGLEDLKGVQEDPVLGNKEILMNSQHETEFILEEDGPASDSTVESSDVYETIISIDDKGQAMYSFGRFDSSIIRIKNPEDGELIDQSEEGLIATGVRISELPLKDCAQGVKKKKSEGSSIGESTRIRCDDCGFLADGLSGLNVHIAMKHPTKEKHFHCLLCGKSFYTESNLHQHLASAGHMRNEQASVEELPEGGATFKCVKCTEPFDSEQNLFLHIKGQHEELLREVNKYIVEDTEQINREREENQGNVCKYCGKMCRSSNSMAFLAHIRTHTGSKPFKCKICHFATAQLGDARNHVKRHLGMREYKCHVCGVAFVMKKHLNTHLLGKHGVGTPKERKFTCHLCDRSFTEKWALNNHMKLHTGEKPFKCTWPTCHYSFLTASAMKDHYRTHTGEKSFLCDLCGFAGGTRHALTKHRRQHTGEKPFKCDECNFASTTQSHLTRHKRVHTGEKPYRCPWCDYRSNCAENIRKHILHTGKHEGVKMYNCPKCDYGTNVPVEFRNHLKEQHPDIENPDLAYLHAGIVSKSYECRLKGQGATFVETDSPFTAAALAEEPLVKEKPLRSSRRPAPPPEQVQQVIIFQGYDGEFALDPSVEETAAATLQTLAMAGQVARVVHITEDGQVIATSQSGAHVGSVVPGPILPEQLADGATQVVVVGGSMEGHGMDESLSPGGAVIQQVTKQEILNLSEAGVAPPEASSALDALLCAVTELGEVEGRAGLEEQGRPGAKDVLIQLPGQEVSHVAADPEAPEIQMFPQAQESPAAVEVLTQVVHPSAAMASQERAQVAFKKMVQGVLQFAVCDTAAAGQLVKDGVTQVVVSEEGAVHMVAGEGAQIIMQEAQGEHMDLVESDGEISQIIVTEELVQAMVQESSGGFSEGTTHYILTELPPGVQDEPGLYSHTVLETADSQELLQAGATLGTEAGAPSRAEQLASVVIYTQEGSSAAAAIQSQRESSELQEA

SEQ ID NO: 456 - protein, 1894 aa, Homo sapiens
MAPEAGATLRAPRRLSWAALLLLAALLPVASSAAASVDHPLKPRHVKLLSTKMGLKVTWDPPKDATSRPVEHYNIAYGKSLKSLKYIKVNAETYSFLIEDVEPGVVYFVLLTAENHSGVSRPVYRAESPPGGEWIEIDGFPIKGPGPFNETVTEKEVPNKPLRVRVRSSDDRLSVAWKAPRLSGAKSPRRSRGFLLGYGESGRKMNYVPLTRDERTHEIKKLASESVYVVSLQSMNSQGRSQPVYRAALTKRKISEEDELDVPDDISVRVMSSQSVLVSWVDPVLEKQKKVVASRQYTVRYREKGELARWDYKQIANRRVLIENLIPDTVYEFAVRISQGERDGKWSTSVFQRTPESAPTTAPENLNVWPVNGKPTVVAASWDALPETEGKVKEYILSYAPALKPFGAKSLTYPGDTTSALVDGLQPGERYLFKIRATNRRGLGPHSKAFIVAMPTTSKADVEQNTEDNGKPEKPEPSSPSPRAPASSQHPSVPASPQGRNAKDLLLDLKNKILANGGAPRKPQLRAKKAEELDLQSTEITGEEELGSREDSPMSPSDTQDQKRTLRPPSRHGHSVVAPGRTAVRARMPALPRREGVDKPGFSLATQPRPGAPPSASASPAHHASTQGTSHRPSLPASLNDNDLVDSDEDERAVGSLHPKGAFAQPRPALSPSRQSPSSVLRDRSSVHPGAKPASPARRTPHSGAAEEDSSASAPPSRLSPPHGGSSRLLPTQPHLSSPLSKGGKDGEDAPATNSNAPSRSTMSSSVSSHLSSRTQVSEGAEASDGESHGDGDREDGGRQAEATAQTLRARPASGHFHLLRHKPFAANGRSPSRFSIGRGPRLQPSSSPQSTVPSRAHPRVPSHSDSHPKLSSGIHGDEEDEKPLPATVVNDHVPSSSRQPISRGWEDLRRSPQRGASLHRKEPIPENPKSTGADTHPQGKYSSLASKAQDVQQSTDADTEGHSPKAQPGSTDRHASPARPPAARSQQHPSVPRRMTPGRAPQQQPPPPVATSQHHPGPQSRDAGRSPSQPRLSLTQAGRPRPTSQGRSHSSSDPYTASSRGMLPTALQNQDEDAQGSYDDDSTEVEAQDVRAPAHAARAKEAAASLPKHQQVESPTGAGAGGDHRSQRGHAASPARPSRPGGPQSRARVPSRAAPGKSEPPSKRPLSSKSQQSVSAEDDEEEDAGFFKGGKEDLLSSSVPKWPSSSTPRGGKDADGSLAKEEREPAIALAPRGGSLAPVKRPLPPPPGSSPRASHVPSRLPPRSAATVSPVAGTHPWPQYTTRAPPGHFSTTPMLSLRQRMMHARFRNPLSRQPARPSYRQGYNGRPNVEGKVLPGSNGKPNGQRIINGPQGTKWVVDLDRGLVLNAEGRYLQDSHGNPLRIKLGGDGRTIVDLEGTPVVSPDGLPLFGQGRHGTPLANAQDKPILSLGGKPLVGLEVIKKTTHPPTTTMQPTTTTTPLPTTTTPRPTTATTRRTTTTRRTTTRRPTTTVRTTTRTTTTTTPTPTTPIPTCPPGTLERHDDDGNLIMSSNGIPECYAEEDEFSGLETDTAVPTEEAYVIYDEDYEFETSRPPTTTEPSTTATTPRVIPEEGAISSFPEEEFDLAGRKRFVAPYVTYLNKDPSAPCSLTDALDHFQVDSLDEIIPNDLKKSDLPPQHAPRNITVVAVEGCHSFVIVDWDKATPGDVVTGYLVYSASYEDFIRNKWSTQASSVTHLPIENLKPNTRYYFKVQAQNPHGYGPISPSVSFVTESDNPLLVVRPPGGEPIWIPFAFKHDPSYTDCHGRQYVKRTWYRKFVGVVLCNSLRYKIYLSDNLKDTFYSIGDSWGRGEDHCQFVDSHLDGRTGPQSYVEALPTIQGYYRQYRQEPVRFGNIGFGTPYYYVGWYECGVSIPGKW

SEQ ID NO: 457 - protein, 1937 aa, Homo sapiens
MSASSDAEMAVFGEAAPYLRKSEKERIEAQNKPFDAKTSVFVAEPKESYVKSTIQSKEGGKVTVKTEGGATLTVREDQVFPMNPPKYDKIEDMAMMTHLHEPGVLYNLKERYAAWMIYTYSGLFCVTVNPYKWLPVYKPEVVAAYRGKKRQEAPPHIFSISDNAYQFMLTDRENQSILITGESGAGKTVNTKRVIQYFATIAVTGEKKKDESGKMQGTLEDQIISANPLLEAFGNAKTVRNDNSSRFGKFIRIHFGTTGKLASADIETYLLEKSRVTFQLKAERSYHIFYQITSNKKPDLIEMLLITTNPYDYAFVSQGEITVPSIDDQEELMATDSAIDILGFTPEEKVSIYKLTGAVMHYGNMKFKQKQREEQAEPDGTEVADKAAYLQSLNSADLLKALCYPRVKVGNEYVTKGQTVQQVYNAVGALAKAVYEKMFLWMVTRINQQLDTKQPRQYFIGVLDIAGFEIFDFNSLEQLCINFTNEKLQQFFNHHMFVLEQEEYKKEGIEWTFIDFGMDLAACIELIEKPLGIFSILEEECMFPKATDTSFKNKLYDQHLGKSANFQKPKVVKGKAEAHFSLIHYAGTVDYNITGWLDKNKDPLNDTVVGLYQKSAMKTLASLFSTYASAEADSSAKKGAKKKGSSFQTVSALFRENLNKLMTNLRSTHPHFVRCIIPNETKTPGAMEHELVLHQLRCNGVLEGIRICRKGFPSRILYGDFKQRYKVLNASAIPEGQFIDSKKASEKLLASIDIDHTQYKFGHTKVFFKAGLLGLLEEMRDEKLAQIITRTQAVCRGFLMRVEYQKMLQRREALFCIQYNVRAFMNVKHWPWMKLFFKIKPLLKSAETEKEMATMKEEFQKTKDELAKSEAKRKELEEKMVTLLKEKNDLQLQVQSEADSLADAEERCEQLIKNKIQLEAKIKEVTERAEEEEEINAELTAKKRKLEDECSELKKDIDDLELTLAKVEKEKHATENKVKNLTEEMAGLDETIAKLSKEKKALQETHQQTLDDLQAEEDKVNILTKAKTKLEQQVDDLEGSLEQEKKLRMDLERAKRKLEGDLKLAQESTMDMENDKQQLDEKLEKKEFEISNLISKIEDEQAVEIQLQKKIKELQARIEELGEEIEAERASRAKAEKQRSDLSRELEEISERLEEAGGATSAQVELNKKREAEFQKLRRDLEEATLQHEAMVAALRKKHADSMAELGEQIDNLQRVKQKLEKEKSELKMETDDLSSNAEAISKAKGNLEKMCRSLEDQVSELKTKEEEQQRLINDLTAQRARLQTEAGEYSRQLDEKDALVSQLSRSKQASTQQIEELKHQLEEETKAKNALAHALQSSRHDCDLLREQYEEEQEGKAELQRALSKANSEVAQWRTKYETDAIQRTEELEEAKKKLAQRLQEAEEHVEAVNAKCASLEKTKQRLQNEVEDLMLDVERSNAACAALDKKQRNFDKVLSEWKQKYEETQAELEASQKESRSLSTELFKVKNVYEESLDQLETLRRENKNLQQEISDLTEQIAEGGKQIHELEKIKKQVEQEKCEIQAALEEAEASLEHEEGKILRIQLELNQVKSEVDRKIAEKDEEIDQLKRNHTRVVETMQSTLDAEIRSRNDALRVKKKMEGDLNEMEIQLNHANRLAAESLRNYRNTQGILKETQLHLDDALRGQEDLKEQLAIVERRANLLQAEIEELWATLEQTERSRKIAEQELLDASERVQLLHTQNTSLINTKKKLENDVSQLQSEVEEVIQESRNAEEKAKKAITDAAMMAEELKKEQDTSAHLERMKKNLEQTVKDLQHRLDEAEQLALKGGKKQIQKLEARVRELEGEVENEQKRNAEAVKGLRKHERRVKELTYQTEEDRKNVLRLQDLVDKLQAKVKSYKRQAEEAEEQSNANLSKFRKLQHELEEAEERADIAESQVNKLRVKSREVHTKISAE

SEQ ID NO: 458 - protein, 3639 aa, Homo sapiens
MDSQYETGHIRKLQARHMQMQEKTFTKWINNVFQCGQAGIKIRNLYTELADGIHLLRLLELISGEALPPPSRGRLRVHFLENSSRALAFLRAKVPVPLIGPENIVDGDQTLILGLIWVIILRFQISHISLDKEEFGASAALLSTKEALLVWCQRKTASYTNVNITDFSRSWSDGLGFNALIHAHRPDLLDYGSLRPDRPLHNLAFAFLVAEQELGIAQLLDPEDVAAAQPDERSIMTYVSLYYHYCSRLHQGQTVQRRLTKILLQLQETELLQTQYEQLVADLLRWIAEKQMQLEARDFPDSLPAMRQLLAAFTIFRTQEKPPRLQQRGAAEALLFRLQTALQAQNRRPFLPHEGLGLAELSQCWAGLEWAEAARSQALQQRLLQLQRLETLARRFQHKAALRESFLKDAEQVLDQARAPPASLATVEAAVQRLGMLEAGILPQEGRFQALAEIADILRQEQYHSWADVARRQEEVTVRWQRLLQHLQGQRKQVADMQAVLSLLQEVEAASHQLEELQEPARSTACGQQLAEVVELLQRHDLLEAQVSAHGAHVSHLAQQTAELDSSLGTSVEVLQAKARTLAQLQQSLVALVRARRALLEQTLQRAEFLRNCEEEEAWLKECGQRVGNAALGRDLSQIAGALQKHKALEAEVHRHQAVCVDLVRRGRDLSARRPPTQPDPGERAEAVQGGWQLLQTRVVGRGARLQTALLVLQYFADAAEAASWLRERRSSLERASCGQDQAAAETLLRRHVRLERVLRAFAAELRRLEEQGRAASARASLFTVNSALSPPGESLRNPGPWSEASCHPGPGDAWKMALPAEPDPDFDPNTILQTQDHLSQDYESLRALAQLRRARLEEAMALFGFCSSCGELQLWLEKQTVLLQRVQPQADTLEVMQLKYENFLTALAVGKGLWAEVSSSAEQLRQRYPGNSTQIQRQQEELSQRWGQLEALKREKAVQLAHSVEVCSFLQECGPTQVQLRDVLLQLEALQPGSSEDTCHALQLAQKKTLVLERRVHFLQSVVVKVEEPGYAESQPLQGQVETLQGLLKQVQEQVAQRARRQAETQARQSFLQESQQLLLWAESVQAQLRSKEVSVDVASAQRLLREHQDLLEEIHLWQERLQQLDAQSQPMAALDCPDSQEVPNTLRVLGQQGQELKVLWEQRQQWLQEGLELQKFGREVDGFTATCANHQAWLHLDNLGEDVREALSLLQQHREFGRLLSTLGPRAEALRAHGEKLVQSQHPAAHTVREQLQSIQAQWTRLQGRSEQRRRQLLASLQLQEWKQDVAELMQWMEEKGLMAAHEPSGARRNILQTLKRHEAAESELLATRRHVEALQQVGRELLSRRPCGQEDIQTRLQGLRSKWEALNRKMTERGDELQQAGQQEQLLRQLQDAKEQLEQLEGALQSSETGQDLRSSQRLQKRHQQLESESRTLAAKMAALASMAHGMAASPAILEETQKHLRRLELLQGHLAIRGLQLQASVELHQFCHLSNMELSWVAEHMPHGSPTSYTECLNGAQSLHRKHKELQVEVKAHQGQVQRVLSSGRSLAASGHPQAQHIVEQCQELEGHWAELERACEARAQCLQQAVTFQQYFLDVSELEGWVEEKRPLVSSRDYGRDEAATLRLINKHQALQEELAIYWSSMEELDQTAQTLTGPEVPEQQRVVQERLREQLRALQELAATRDRELEGTLRLHEFLREAEDLQGWLASQKQAAKGGESLGEDPEHALHLCTKFAKFQHQVEMGSQRVAACRLLAESLLERGHSAGPMVRQRQQDLQTAWSELWELTQARGHALRDTETTLRVHRDLLEVLTQVQEKATSLPNNVARDLCGLEAQLRSHQGLERELVGTERQLQELLETAGRVQKLCPGPQAHAVQQRQQAVTQAWAVLQRRMEQRRAQLERARLLARFRTAVRDYASWAARVRQDLQVEESSQEPSSGPLKLSAHQWLRAELEAREKLWQQATQLGQQALLAAGTPTKEVQEELRALQDQRDQVYQTWARKQERLQAEQQEQLFLRECGRLEEILAAQEVSLKTSALGSSVEEVEQLIRKHEVFLKVLTAQDKKEAALRERLKTLRRPRVRDRLPILLQRRMRVKELAESRGHALHASLLMASFTQAATQAEDWIQAWAQQLKEPVPPGDLRDKLKPLLKHQAFEAEVQAHEEVMTSVAKKGEALLAQSHPRAGEVSQRLQGLRKHWEDLRQAMALRGQELEDRRNFLEFLQRVDLAEAWIQEKEVKMNVGDLGQDLEHCLQLRRRLREFRGNSAGDTVGDACIRSISDLSLQLKNRDPEEVKIICQRRSQLNNRWASFHGNLLRYQQQLEGALEIHVLSRELDNVTKRIQEKEALIQALDCGKDLESVQRLLRKHEELEREVHPIQAQVESLEREVGRLCQRSPEAAHGLRHRQQEVAESWWQLRSRAQKRREALDALHQAQKLQAMLQELLVSAQRLRAQMDTSPAPRSPVEARRMLEEHQECKAELDSWTDSISLARSTGQQLLTAGHPFSSDIRQVLAGLEQELSSLEGAWQEHQLQLQQALELQLFLSSVEKMERWLCSKEDSLASEGLWDPLAPMEPLLWKHKMLEWDLEVQAGKISALEATARGLHQGGHPEAQSALGRCQAMLLRKEALFRQAGTRRHRLEELRQLQAFLQDSQEVAAWLREKNLVALEEGLLDTAMLPAQLQKQQNFQAELDASMHQQQELQREGQRLLQGGHPASEAIQERLEELGALWGELQDNSQKKVAKLQKACEALRLRRSMEELENWLEPIEVELRAPTVGQALPGVGELLGTQRELEAAVDKKARQAEALLGQAQAFVREGHCLAQDVEEQARRLLQRFKSLREPLQERRTALEARSLLLKFFRDADEEMAWVQEKLPLAAAQDYGQSLSAVRHLQEQHQNLESEMSSHEALTRVVLGTGYKLVQAGHFAAHEVAARVQQLEKAMAHLRAEAARRRLLLQQAQEAQQFLTELLEAGSWLAERGHVLDSEDMGHSAEATQALLRRLEATKRDLEAFSPRIERLQQTAALLESRKNPESPKVLAQLQAVREAHAELLRRAEARGHGLQEQLQLHQLERETLLLDAWLTTKAATAESQDYGQDLEGVKVLEEKFDAFRKEVQSLGQAKVYALRKLAGTLERGAPRRYPHIQAQRSRIEAAWERLDQAIKARTENLAAAHEVHSFQQAAAELQGRMQEKTALMKGEDGGHSLSSVRTLQQQHRRLERELEAMEKEVARLQTEACRLGQLHPAAPGGLAKVQEAWATLQAKAQERGQWLAQAAQGHAFLGRCQELLAWAQERQELASSEELAEDVAGAEQLLGQHEELGQEIRECRLQAQDLRQEGQQLVDNSHFMSAEVTECLQELEGRLQELEEAWALRWQRCAESWGLQKLRQRLEQAEAWLACWEGLLLKPDYGHSVSDVELLLHRHQDLEKLLAAQEEKFAQMQKTEMEQELLLQPQELKPGRAGSSLTSFQWRPSGHQGLGAQLAETRDPQDAKGTPTMEGSLEFKQHLLPGGRQPSSSSWDSCRGNLQGSSLSLFLDERMAAEKVASIALLDLTGARCERLRGRHGRKHTFSLRLTSGAEILFAAPSEEQAESWWRALGSTAAQSLSPKLKAKPVSSLNECTTKDARPGCLLRSDP

SEQ ID NO: 459 - protein, 2849 aa, Homo sapiens
MAEEAAQNISDDQERCLQAACCLSFGGELSVSTDKSWGLHLCSCSPPGGGLWVEVYANHVLLMSDGKCGCPWCALNGKAEDRESQSPSSSASRQKNIWKTTSEAALSVVNEKTQAVVNEKTQAPLDCDNSADRIPHKPFIIIARAWSSGGPRFHHRRLCATGTADSTFSALLQLQGTTSAAAPCSLKMEASCCVLRLLCCAEDVATGLLPGTVTMETPTKVARPTQTSSQRVPLWPISHFPTSPRSSHGLPPGIPRTPSFTASQSGSEILYPPTQHPPVAILARNSDNFMNPVLNCSLEVEARAPPNLGFRVHMASGEALCLMMDFGDSSGVEMRLHNMSEAMAVTAYHQYSKGIFFHLLHFQLDMSTYKEAETQNTTLNVYLCQSENSCLEDSDPSNLGYELISAFVTKGVYMLKAVIYNEFHGTEVELGPYYVEIGHEAVSAFMNSSSVHEDEVLVFADSQVNQKSTVVIHHFPSIPSYNVSFISQTQVGDSQAWHSMTVWYKMQSVSVYTNGTVFATDTDITFTAVTKETIPLEFEWYFGEDPPVRTTSRSIKKRLSIPQWYRVMVKASNRMSSVVSEPHVIRVQKKIVANRLTSPSSALVNASVAFECWINFGTDVAYLWDFGDGTVSLGSSSSSHVYSREGEFTVEVLAFNNVSASTLRQQLFIVCEPCQPPLVKNMGPGKVQIWRSQPVRLGVTFEAAVFCDISQGLSYTWNLMDSEGLPVSLPAAVDTHRQTLILPSHTLEYGNYTALAKVQIEGSVVYSNYCVGLEVRAQAPVSVISEGTHLFFSRTTSSPIVLRGTQSFDPDDPGATLRYHWECATAGSPAHPCFDSSTAHQLDAAAPTVSFEAQWLSDSYDQFLVMLRVSSGGRNSSETRVFLSPYPDSAFRFVHISWVSFKDTFVNWNDELSLQAMCEDCSEIPNLSYSWDLFLVNATEKNRIEVPFCRVVGLLGSLGLGAISESSQLNLLPTEPGTADPDATTTPFSREPSPVTLGQPATSAPRGTPTEPMTGVYWIPPAGDSAVLGEAPEEGSLDLEPGPQSKGSLMTGRSERSQPTHSPDPHLSDFEAYYSDIQEAIPSGGRQPAKDTSFPGSGPSLSAEESPGDGDNLVDPSLSAGRAEPVLMIDWPKALLGRAVFQGYSSSGITEQTVTIKPYSLSSGETYVLQVSVASKHGLLGKAQLYLTVNPAPRDMACQVQPHHGLEAHTVFSVFCMSGKPDFHYEFSYQIGNTSKHTLYHGRDTQYYFVLPAGEHLDNYKVMVSTEITDGKGSKVQPCTVVVTVLPRYHGNDCLGEDLYNSSLKNLSTLQLMGSYTEIRNYITVITRILSRLSKEDKTASCNQWSRIQDALISSVCRLAFVDQEEMIGSVLMLRDLVSFSNKLGFMSAVLILKYTRALLAQGQFSGPFVIDKGVRLELIGLISRVWEVSEQENSKEEVYRHEEGITVISDLLLGCLSLNHVSTGQMEFRTLLHYNLQSSVQSLGSVQVHLPGDLAGHSPAGAETQSPCYISQLILFKKNPYPGSQAPGQIGGVVGLNLYTCSSRRPINRQWLRKPVMVEFGEEDGLDNRRNKTTFVLLRDKVNLHQFTELSENPQESLQIEIEFSKPVTRAFPVMLLVRFSEKPTPSDFLVKQIYFWDESIVQIYIPAASQKDASVGYLSLLDADYDRKPPNRYLAKAVNYTVHFQWIRCLFWDKREWKSERFSPQPGTSPEKVNCSYHRLAAFALLRRKLKASFEVSDISKLQSHPENLLPSIFIMGSVILYGFLVAKSRQVDHHEKKKAGYIFLQEASLPGHQLYAVVIDTGFRAPARLTSKVYIVLCGDNGLSETKELSCPEKPLFERNSRHTFILSAPAQLGLLRKIRLWHDSRGPSPGWFISHVMVKELHTGQGWFFPAQCWLSAGRHDGRVERELTCLQGGLGFRKLFYCKFTEYLEDFHVWLSVYSRPSSSRYLHTPRLTVSFSLLCVYACLTALVAAGGQEQPHLDVSPTLGSFRVGLLCTLLASPGAQLLSLLFRLSKEAPGSARVEPHSPLRGGAQTEAPHGPNSWGRIPDAQEPRKQPASAILSGSGRAQRKAASDNGTACPAPKLQVHGADHSRTSLMGKSHCCPPHTQAPSSGLEGLMPQWSRALQPWWSSAVWAICGTASLACSLGTGFLAYRFGQEQCVQWLHLLSLSVVCCIFITQPLMVCLMALGFAWKRRADNHFFTESLCEATRDLDSELAERSWTRLPFSSSCSIPDCAGEVEKVLAARQQARHLRWAHPPSKAQLRGTRQRMRRESRTRAALRDISMDILMLLLLLCVIYGRFSQDEYSLNQAIRKEFTRNARNCLGGLRNIADWWDWSLTTLLDGLYPGGTPSARVPGAQPGALGGKCYLIGSSVIRQLKVFPRHLCKPPRPFSALIEDSIPTCSPEVGGPENPYLIDPENQNVTLNGPGGCGTREDCVLSLGRTRTEAHTALSRLRASMWIDRSTRAVSVHFTLYNPPTQLFTSVSLRVEILPTGSLVPSSLVESFSIFRSDSALQYHLMLPQLVFLALSLIHLCVQLYRMMDKGVLSYWRKPRNWLELSVVGVSLTYYAVSGHLVTLAGDVTNQFHRGLCRAFMDLTLMASWNQRARWLRGILLFLFTLKCVYLPGIQNTMASCSSMMRHSLPSIFVAGLVGALMLAALSHLHRFLLSMWVLPPGTFTDAFPGLLFHFPRRSQKDCLLGLSKSDQRAMACYFGILLIVSATLCFGMLRGFLMTLPQKRKSFQSKSFVRLKDVTAYMWEKVLTFLRLETPKLEEAEMVENHNYYLDEFANLLDELLMKINGLSDSLQLPLLEKTSNNTGEARTEESPLVDISSYQAAEPADIKDF

SEQ ID NO: 460 - protein, 1584 aa, Homo sapiens
MSKQVSLPEMIKDWTKEHVKKWVNEDLKINEQYGQILLSEEVTGLVLQELTEKDLVEMGLPWGPALLIKRSYNKLNSKSPESDNHDPGQLDNSKPSKTEHQKNPKHTKKEEENSMSSNIDYDPREIRDIKQEESILMKENVLDEVANAKHKKKGKLKPEQLTCMPYPFDQFHDSHRYIEHYTLQPETGALNLIDPIHEFKALTNTETATEVDIKMKFSNEVFRFASACMNSRTNGTIHFGVKDKPHGEIVGVKITSKAAFIDHFNVMIKKYFEESEINEAKKCIREPRFVEVLLQNNTPSDRFVIEVDTIPKHSICNDKYFYIQMQICKDKIWKQNQNLSLFVREGASSRDILANSKQRDVDFKAFLQNLKSLVASRKEAEEEYGMKAMKKESEGLKLVKLLIGNRDSLDNSYYDWYILVTNKCHPNQIKHLDFLKEIKWFAVLEFDPESMINGVVKAYKESRVANLHFPNQYEDKTTNMWEKISTLNLYQQPSWIFCNGRSDLKSETYKPLEPHLWQRERASEVRKLILFLTDENIMTRGKFLVVFLLLSSVESPGDPLIETFWAFYQALKGMENMLCISVNSHIYQRWKDLLQTRMKMEDELTNHSISTLNIELVNSTILKLKSVTRSSRRFLPARGSSSVILEKKKEDVLTALEILCENECTETDIEKDKSKFLEFKKSKEEHFYRGGKVSWWNFYFSSENYSSDFVKRDSYEKLKDLIHCWAESPKPIFAKIINLYHHPGCGGTTLAMHVLWDLKKNFRCAVLKNKTTDFAEIAEQVINLVTYRAKSHQDYIPVLLLVDDFEEQENVYFLQNAIHSVLAEKDLRYEKTLVIILNCMRSRNPDESAKLADSIALNYQLSSKEQRAFGAKLKEIEKQHKNCENFYSFMIMKSNFDETYIENVVRNILKGQDVDSKEAQLISFLALLSSYVTDSTISVSQCEIFLGIIYTSTPWEPESLEDKMGTYSTLLIKTEVAEYGRYTGVRIIHPLIALYCLKELERSYHLDKCQIALNILEENLFYDSGIGRDKFQHDVQTLLLTRQRKVYGDETDTLFSPLMEALQNKDIEKVLSAGSRRFPQNAFICQALARHFYIKEKDFNTALDWARQAKMKAPKNSYISDTLGQVYKSEIKWWLDGNKNCRSITVNDLTHLLEAAEKASRAFKESQRQTDSKNYETENWSPQKSQRRYDMYNTACFLGEIEVGLYTIQILQLTPFFHKENELSKKHMVQFLSGKWTIPPDPRNECYLALSKFTSHLKNLQSDLKRCFDFFIDYMVLLKMRYTQKEIAEIMLSKKVSRCFRKYTELFCHLDPCLLQSKESQLLQEENCRKKLEALRADRFAGLLEYLNPNYKDATTMESIVNEYAFLLQQNSKKPMTNEKQNSILANIILSCLKPNSKLIQPLTTLKKQLREVLQFVGLSHQYPGPYFLACLLFWPENQELDQDSKLIEKYVSSLNRSFRGQYKRMCRSKQASTLFYLGKRKGLNSIVHKAKIEQYFDKAQNTNSLWHSGDVWKKNEVKDLLRRLTGQAEGKLISVEYGTEEKIKIPVISVYSGPLRSGRNIERVSFYLGFSIEGPLAYDIEVI

SEQ ID NO: 461 - protein, 1720 aa, Homo sapiens
MAAAPSALLLLPPFPVLSTYRLQSRSRPSAPETDDSRVGGIMRGEKNYYFRGAAGDHGSCPTTTSPLASALLMPSEAVSSSWSESGGGLSGGDEEDTRLLQLLRTARDPSEAFQALQAALPRRGGRLGFPRRKEALYRALGRVLVEGGSDEKRLCLQLLSDVLRGQGEAGQLEEAFSLALLPQLVVSLREENPALRKDALQILHICLKRSPGEVLRTLIQQGLESTDARLRASTALLLPILLTTEDLLLGLDLTEVIISLARKLGDQETEEESETAFSALQQIGERLGQDRFQSYISRLPSALRRHYNRRLESQFGSQVPYYLELEASGFPEDPLPCAVTLSNSNLKFGIIPQELHSRLLDQEDYKNRTQAVEELKQVLGKFNPSSTPHSSLVGFISLLYNLLDDSNFKVVHGTLEVLHLLVIRLGEQVQQFLGPVIAASVKVLADNKLVIKQEYMKIFLKLMKEVGPQQVLCLLLEHLKHKHSRVREEVVNICICSLLTYPSEDFDLPKLSFDLAPALVDSKRRVRQAALEAFAVLASSMGSGKTSILFKAVDTVELQDNGDGVMNAVQARLARKTLPRLTEQGFVEYAVLMPSSAGGRSNHLAHGADTDWLLAGNRTQSAHCHCGDHVRDSMHIYGSYSPTICTRRVLSAGKGKNKLPWENEQPGIMGENQTSTSKDIEQFSTYDFIPSAKLKLSQGMPVNDDLCFSRKRVSRNLFQNSRDFNPDCLPLCAAGTTGTHQTNLSGKCAQLGFSQICGKTGSVGSDLQFLGTTSSHQEKVYASLNFGSKTQQTFGSQTECTSSNGQNPSPGAYILPSYPVSSPRTSPKHTSPLIISPKKSQDNSVNFSNSWPLKSFEGLSKPSPQKKLVSQKSSDPTGRNHGENSQEKPPVQLTPALVRSPSSRRGLNGTKPVPPIPRGISLLPDKADLSTVGHKKKEPDDIWKCEKDSLPIDLSELNFKDKDLDQEEMHSSLRSLRNSAAKKRAKLSGSTSDLESPDSAMKLDLTMDSPSLSSSPNINSYSESGVYSQESLTSSLSTTPQGKRIMSDIFPTFGSKPCPTRLSSAKKKISHIAEQSPSAGSSSNPQQISSFDFTTTKALSEDSVVVVGKGVFGSLSSAPATCSQSVISSVENGDTFSIKQSIEPPSGIYGRSVQQNISSYLDVENEKDAKVSISKSTYNKMRQKRKEEKELFHNKDCEKKEKNSWERMRHTGTEKMASESETPTGAISQYKERMPSVTHSPEIMDLSELRPFSKPEIALTEALRLLADEDWEKKIEGLNFIRCLAAFHSEILNTKLHETNFAVVQEVKNLRSGVSRAAVVCLSDLFTYLKKSMDQELDTTVKVLLHKAGESNTFIREDVDKALRAMVNNVTPARAVVSLINGGQRYYGRKMLFFMMCHPNFEKMLEKYVPSKDLPYIKDSVRNLQQKGLGEIPLDTPSAKGRRSHTGSVGNTRSSSVSRDAFNSAERAVTEVREVTRKSVPRNSLESAEYLKLITGLLNAKDFRDRINGIKQLLSDTENNQDLVVGNIVKIFDAFKSRLHDSNSKVNLVALETMHKMIPLLRDHLSPIINMLIPAIVDNNLNSKNPGIYAAATNVVQALSQHVDNYLLLQPFCTKAQFLNGKAKQDMTEKLADIVTELYQRKPHATEQKVLVVLWHLLGNMTNSGSLPGAGGNIRTATAKLSKALFAQMGQNLLNQAASQPPHIKKSLEELLDMTILNEL

SEQ ID NO: 462 - protein, 1796 aa, Homo sapiens
MKIFQRKMRYWLLPPFLAIVYFCTIVQGQVAPPTRLRYNVISHDSIQISWKAPRGKFGGYKLLVTPTSGGKTNQLNLQNTATKAIIQGLMPDQNYTVQIIAYNKDKESKPAQGQFRIKDLEKRKDPKPRVKVVDRGNGSRPSSPEEVKFVCQTPAIADIVILVDGSWSIGRFNFRLVRHFLENLVTAFDVGSEKTRIGLAQYSGDPRIEWHLNAFSTKDEVIEAVRNLPYKGGNTLTGLALNYIFENSFKPEAGSRTGVSKIGILITDGKSQDDIIPPSRNLRESGVELFAIGVKNADVNELQEIASEPDSTHVYNVAEFDLMHTVVESLTRTLCSRVEEQDREIKASAHAITGPPTELITSEVTARSFMVNWTHAPGNVEKYRVVYYPTRGGKPDEVVVDGTVSSTVLKNLMSLTEYQIAVFAIYAHTASEGLRGTETTLALPMASDLLLYDVTENSMRVKWDAVPGASGYLILYAPLTEGLAGDEKEMKIGETHTDIELSGLLPNTEYTVTVYAMFGEEASDPVTGQETTLALSPPRNLRISNVGSNSARLTWDPTSRQINGYRIVYNNADGTEINEVEVDPITTFPLKGLTPLTEYTIAIFSIYDEGQSEPLTGVFTTEEVPAQQYLEIDEVTTDSFRVTWHPLSADEGLHKLMWIPVYGGKTEEVVLKEEQDSHVIEGLEPGTEYEVSLLAVLDDGSESEVVTAVGTTLDSFWTEPATTIVPTTSVTSVFQTGIRNLVVGDETTSSLRVKWDISDSDVQQFRVTYMTAQGDPEEEVIGTVMVPGSQNNLLLKPLLPDTEYKVTVTPIYTDGEGVSVSAPGKTLPSSGPQNLRVSEEWYNRLRITWDPPSSPVKGYRIVYKPVSVPGPTLETFVGADINTILITNLLSGMDYNVKIFASQASGFSDALTGMVKTLFLGVTNLQAKHVEMTSLCAHWQVHRHATAYRVVIESLQDRQKQESTVGGGTTRHCFYGLQPDSEYKISVYTKLQEIEGPSVSIMEKTQSLPTRPPTFPPTIPPAKEVCKAAKADLVFMVDGSWSIGDENFNKIISFLYSTVGALNKIGTDGTQVAMVQFTDDPRTEFKLNAYKTKETLLDAIKHISYKGGNTKTGKAIKYVRDTLFTAESGTRRGIPKVIVVITDGRSQDDVNKISREMQLDGYSIFAIGVADADYSELVSIGSKPSARHVFFVDDFDAFKKIEDELITFVCETASATCPVVHKDGIDLAGFKMMEMFGLVEKDFSSVEGVSMEPGTFNVFPCYQLHKDALVSQPTRYLHPEGLPSDYTISFLFRILPDTPQEPFALWEILNKNSDPLVGVILDNGGKTLTYFNYDQSGDFQTVTFEGPEIRKIFYGSFHKLHIVVSETLVKVVIDCKQVGEKAMNASANITSDGVEVLGKMVRSRGPGGNSAPFQLQMFDIVCSTSWANTDKCCELPGLRDDESCPDLPHSCSCSETNEVALGPAGPPGGPGLRGPKGQQGEPGPKGPDGPRGEIGLPGPQGPPGPQGPSGLSIQGMPGMPGEKGEKGDTGLPGPQGIPGGVGSPGRDGSPGQRGLPGKDGSSGPPGPPGPIGIPGTPGVPGITGSMGPQGALGPPGVPGAKGERGERGDLQSQAMVRSVARQVCEQLIQSHMARYTAILNQIPSHSSSIRTVQGPPGEPGRPGSPGAPGEQGPPGTPGFPGNAGVPGTPGERGLTGIKGEKGNPGVGTQGPRGPPGPAGPSGESRPGSPGPPGSPGPRGPPGHLGVPGPQGPSGQPGYCDPSSCSAYGVRAPHPDQPEFTPVQDELEAMELWGPGV

SEQ ID NO: 463 - protein, 1703 aa, Homo sapiens
MSLLCVGVKKAKFDGAQEKFNTYVTLKVQNVKSTTIAVRGSQPSWEQDFMFEINRLDLGLTVEVWNKGLIWDTMVGTVWIPLRTIRQSNEEGPGEWLTLDSQVIMADSEICGTKDPTFHRILLDTRFELPLDIPEEEARYWAKKLEQLNAMRDQDEYSFQDEQDKPLPVPSNQCCNWNYFGWGEQHNDDPDSAVDDRDSDYRSETSNSIPPPYYTTSQPNASVHQYSVRPPPLGSRESYSDSMHSYEEFSEPQALSPTGSSRYASSGELSQGSSQLSEDFDPDEHSLQGSDMEDERDRDSYHSCHSSVSYHKDSPRWDQDEEELEEDLEDFLEEEELPEDEEELEEEEEEVPDDLGSYAQREDVAVAEPKDFKRISLPPAAPGKEDKAPVAPTEAPDMAKVAPKPATPDKVPAAEQIPEAEPPKDEESFRPREDEEGQEGQDSMSRAKANWLRAFNKVRMQLQEARGEGEMSKSLWFKGGPGGGLIIIDSMPDIRKRKPIPLVSDLAMSLVQSRKAGITSALASSTLNNEELKNHVYKKTLQALIYPISCTTPHNFEVWTATTPTYCYECEGLLWGIARQGMRCTECGVKCHEKCQDLLNADCLQRAAEKSSKHGAEDRTQNIIMVLKDRMKIRERNKPEIFELIQEIFAVTKTAHTQQMKAVKQSVLDGTSKWSAKISITVVCAQGLQAKDKTGSSDPYVTVQVGKTKKRTKTIYGNLNPVWEENFHFECHNSSDRIKVRVWDEDDDIKSRVKQRFKRESDDFLGQTIIEVRTLSGEMDVWYNLDKRTDKSAVSGAIRLHISVEIKGEEKVAPYHVQYTCLHENLFHFVTDVQNNGVVKIPDAKGDDAWKVYYDETAQEIVDEFAMRYGVESIYQAMTHFACLSSKYMCPGVPAVMSTLLANINAYYAHTTASTNVSASDRFAASNFGKERFVKLLDQLHNSLRIDLSMYRNNFPASSPERLQDLKSTVDLLTSITFFRMKVQELQSPPRASQVVKDCVKACLNSTYEYIFNNCHELYSREYQTDPAKKGEVLPEEQGPSIKNLDFWSKLITLIVSIIEEDKNSYTPCLNQFPQELNVGKISAEVMWNLFAQDMKYAMEEHDKHRLCKSADYMNLHFKVKWLYNEYVTELPAFKDRVPEYPAWFEPFVIQWLDENEEVSRDFLHGALERDKKDGFQQTSEHALFSCSVVDVFSQLNQSFEIIKKLECPDPQIVGHYMRRFAKTISNVLLQYADIISKDFASYCSKEKEKVPCILMNNTQQLRVQLEKMFEAMGGKELDAEASDILKELQVKLNNVLDELSRVFATSFQPHIEECVKQMGDILSQVKGTGNVPASACSSVAQDADNVLQPIMDLLDSNLTLFAKICEKTVLKRVLKELWKLVMNTMEKTIVLPPLTDQTMIGNLLRKHGKGLEKGRVKLPSHSDGTQMIFNAAKELGQLSKLKDHMVREEAKSLTPKQCAVVELALDTIKQYFHAGGVGLKKTFLEKSPDLQSLRYALSLYTQATDLLIKTFVQTQSAQGLGVEDPVGEVSVHVELFTHPGTGEHKVTVKVVAANDLKWQTSGIFRPFIEVNIIGPQLSDKKRKFATKSKNNSWAPKYNESFQFTLSADAGPECYELQVCVKDYCFAREDRTVGLAVLQLRELAQRGSAACWLPLGRRIHMDDTGLTVLRILSQRSNDEVAKEFVKLKSDTRSAEEGGAAPAP

SEQ ID NO: 464 - protein, 2466 aa, Homo sapiens
MGRKTSRVQQGPPRSPACSAHGERSWGLEFPPFRWLLGIAGRTHLAALPPFQWVLAFEIFIPLVLFFILLGLRQKKPTISVKEVSFYTAAPLTSAGILPVMQSLCPDGQRDEFGFLQYANSTVTQLLERLDRVVEEGNLFDPARPSLGSELEALRQHLEALSAGPGTSGSHLDRSTVSSFSLDSVARNPQELWRFLTQNLSLPNSTAQALLAARVDPPEVYHLLFGPSSALDSQSGLHKGQEPWSRLGGNPLFRMEELLLAPALLEQLTCTPGSGELGRILTVPESQKGALQGYRDAVCSGQAAARARRFSGLSAELRNQLDVAKVSQQLGLDAPNGSDSSPQAPPPRRLQALLGDLLDAQKVLQDVDVLSALALLLPQGACTGRTPGPPASGAGGAANGTGAGAVMGPNATAEEGAPSAAALATPDTLQGQCSAFVQLWAGLQPILCGNNRTIEPEALRRGNMSSLGFTSKEQRNLGLLVHLMTSNPKILYAPAGSEVDRVILKANETFAFVGNVTHYAQVWLNISAEIRSFLEQGRLQQHLRWLQQYVAELRLHPEALNLSLDELPPALRQDNFSLPSGMALLQQLDTIDNAACGWIQFMSKVSVDIFKGFPDEESIVNYTLNQAYQDNVTVFASVIFQTRKDGSLPPHVHYKIRQNSSFTEKTNEIRRAYWRPGPNTGGRFYFLYGFVWIQDMMERAIIDTFVGHDVVEPGSYVQMFPYPCYTRDDFLFVIEHMMPLCMVISWVYSVAMTIQHIVAEKEHRLKEVMKTMGLNNAVHWVAWFITGFVQLSISVTALTAILKYGQVLMHSHVVIIWLFLAVYAVATIMFCFLVSVLYSKAKLASACGGIIYFLSYVPYMYVAIREEVAHDKITAFEKCIASLMSTTAFGLGSKYFALYEVAGVGIQWHTFSQSPVEGDDFNLLLAVTMLMVDAVVYGILTWYIEAVHPGMYGLPRPWYFPLQKSYWLGSGRTEAWEWSWPWARTPRLSVMEEDQACAMESRRFEETRGMEEEPTHLPLVVCVDKLTKVYKDDKKLALNKLSLNLYENQVVSFLGHNGAGKTTTMSILTGLFPPTSGSATIYGHDIRTEMDEIRKNLGMCPQHNVLFDRLTVEEHLWFYSRLKSMAQEEIRREMDKMIEDLELSNKRHSLVQTLSGGMKRKLSVAIAFVGGSRAIILDEPTAGVDPYARRAIWDLILKYKPGRTILLSTHHMDEADLLGDRIAIISHGKLKCCGSPLFLKGTYGDGYRLTLVKRPAEPGGPQEPGLASSPPGRAPLSSCSELQVSQFIRKHVASCLLVSDTSTELSYILPSEAAKKGAFERLFQHLERSLDALHLSSFGLMDTTLEEVFLKVSEEDQSLENSEADVKESRKDVLPGAEGPASGEGHAGNLARCSELTQSQASLQSASSVGSARGDEGAGYTDVYGDYRPLFDNPQDPDNVSLQEVEAEALSRVGQGSRKLDGGWLKVRQFHGLLVKRFHCARRNSKALFSQILLPAFFVCVAMTVALSVPEIGDLPPLVLSPSQYHNYTQPRGNFIPYANEERREYRLRLSPDASPQQLVSTFRLPSGVGATCVLKSPANGSLGPTLNLSSGESRLLAARFFDSMCLESFTQGLPLSNFVPPPPSPAPSDSPASPDEDLQAWNVSLPPTAGPEMWTSAPSLPRLVREPVRCTCSAQGTGFSCPSSVGGHPPQMRVVTGDILTDITGHNVSEYLLFTSDRFRLHRYGAITFGNVLKSIPASFGTRAPPMVRKIAVRRAAQVFYNNKGYHSMPTYLNSLNNAILRANLPKSKGNPAAYGITVTNHPMNKTSASLSLDYLLQGTDVVIAIFIIVAMSFVPASFVVFLVAEKSTKAKHLQFVSGCNPIIYWLANYVWDMLNYLVPATCCVIILFVFDLPAYTSPTNFPAVLSLFLLYGWSITPIMYPASFWFEVPSSAYVFLIVINLFIGITATVATFLLQLFEHDKDLKVVNSYLKSCFLIFPNYNLGHGLMEMAYNEYINEYYAKIGQFDKMKSPFEWDIVTRGLVAMAVEGVVGFLLTIMCQYNFLRRPQRMPVSTKPVEDDVDVASERQRVLRGDADNDMVKIENLTKVYKSRKIGRILAVDRLCLGVRPGECFGLLGVNGAGKTSTFKMLTGDESTTGGEAFVNGHSVLKELLQVQQSLGYCPQCDALFDELTAREHLQLYTRLRGISWKDEARVVKWALEKLELTKYADKPAGTYSGGNKRKLSTAIALIGYPAFIFLDEPTTGMDPKARRFLWNLILDLIKTGRSVVLTSHSMEECEALCTRLAIMVNGRLRCLGSIQHLKNRFGDGYMITVRTKSSQSVKDVVRFFNRNFPEAMLKERHHTKVQYQLKSEHISLAQVFSKMEQVSGVLGIEDYSVSQTTLDNVFVNFAKKQSDNLEQQETEPPSALQSPLGCLLSLLRPRSAPTELRALVADEPEDLDTEDEGLISFEEERAQLSFNTDTLC

SEQ ID NO: 465 - protein, 1912 aa, Homo sapiens
MASGLGSPSPCSAGSEEEDMDALLNNSLPPPHPENEEDPEEDLSETETPKLKKKKKPKKPRDPKIPKSKRQKKERMLLCRQLGDSSGEGPEFVEEEEEVALRSDSEGSDYTPGKKKKKKLGPKKEKKSKSKRKEEEEEEDDDDDSKEPKSSAQLLEDWGMEDIDHVFSEEDYRTLTNYKAFSQFVRPLIAAKNPKIAVSKMMMVLGAKWREFSTNNPFKGSSGASVAAAAAAAVAVVESMVTATEVAPPPPPVEVPIRKAKTKEGKGPNARRKPKGSPRVPDAKKPKPKKVAPLKIKLGGFGSKRKRSSSEDDDLDVESDFDDASINSYSVSDGSTSRSSRSRKKLRTTKKKKKGEEEVTAVDGYETDHQDYCEVCQQGGEIILCDTCPRAYHMVCLDPDMEKAPEGKWSCPHCEKEGIQWEAKEDNSEGEEILEEVGGDLEEEDDHHMEFCRVCKDGGELLCCDTCPSSYHIHCLNPPLPEIPNGEWLCPRCTCPALKGKVQKILIWKWGQPPSPTPVPRPPDADPNTPSPKPLEGRPERQFFVKWQGMSYWHCSWVSELQLELHCQVMFRNYQRKNDMDEPPSGDFGGDEEKSRKRKNKDPKFAEMEERFYRYGIKPEWMMIHRILNHSVDKKGHVHYLIKWRDLPYDQASWESEDVEIQDYDLFKQSYWNHRELMRGEEGRPGKKLKKVKLRKLERPPETPTVDPTVKYERQPEYLDATGGTLHPYQMEGLNWLRFSWAQGTDTILADEMGLGKTVQTAVFLYSLYKEGHSKGPFLVSAPLSTIINWEREFEMWAPDMYVVTYVGDKDSRAIIRENEFSFEDNAIRGGKKASRMKKEASVKFHVLLTSYELITIDMAILGSIDWACLIVDEAHRLKNNQSKFFRVLNGYSLQHKLLLTGTPLQNNLEELFHLLNFLTPERFHNLEGFLEEFADIAKEDQIKKLHDMLGPHMLRRLKADVFKNMPSKTELIVRVELSPMQKKYYKYILTRNFEALNARGGGNQVSLLNVVMDLKKCCNHPYLFPVAAMEAPKMPNGMYDGSALIRASGKLLLLQKMLKNLKEGGHRVLIFSQMTKMLDLLEDFLEHEGYKYERIDGGITGNMRQEAIDRFNAPGAQQFCFLLSTRAGGLGINLATADTVIIYDSDWNPHNDIQAFSRAHRIGQNKKVMIYRFVTRASVEERITQVAKKKMMLTHLVVRPGLGSKTGSMSKQELDDILKFGTEELFKDEATDGGGDNKEGEDSSVIHYDDKAIERLLDRNQDETEDTELQGMNEYLSSFKVAQYVVREEEMGEEEEVEREIIKQEESVDPDYWEKLLRHHYEQQQEDLARNLGKGKRIRKQVNYNDGSQEDRDWQDDQSDNQSDYSVASEEGDEDFDERSEAPRRPSRKGLRNDKDKPLPPLLARVGGNIEVLGFNARQRKAFLNAIMRYGMPPQDAFTTQWLVRDLRGKSEKEFKAYVSLFMRHLCEPGADGAETFADGVPREGLSRQHVLTRIGVMSLIRKKVQEFEHVNGRWSMPELAEVEENKKMSQPGSPSPKTPTPSTPGDTQPNTPAPVPPAEDGIKIEENSLKEEESIEGEKEVKSTAPETAIECTQAPAPASEDEKVVVEPPEGEEKVEKAEVKERTEEPMETEPKGAADVEKVEEKSAIDLTPIVVEDKEEKKEEEEKKEVMLQNGETPKDLNDEKQKKNIKQRFMFNIADGGFTELHSLWQNEERAATVTKKTYEIWHRRHDYWLLAGIINHGYARWQDIQNDPRYAILNEPFKGEMNRGNFLEIKNKFLARRFKLLEQALVIEEQLRRAAYLNMSEDPSHPSMALNTRFAEVECLAESHQHLSKESMAGNKPANAVLHKVLKQLEELLSDMKADVTRLPATIARIPPVAVRLQMSERNILSRLANRAPEPTPQQVAQQQ

SEQ ID NO: 466 - protein, 1590 aa, Homo sapiens
MKAVVLGTDLAELRVATERWVLSPPQMLPLSPRGLADLQADTARTARRLHTACLNLDSNLRLSASSTASTLGQQLRDKAGEMLQLQGRWDAEKVALQARWAPRASKLAQGGPGGSGPIQRAEQLWIPDVVTPFQGRLSEQTLLVEKLTEQNEQKAKTIAALRTDLQNLVAQEDARCLELAGSSITELGEPRRPLRSPQRATSPHQGASPPHICSPATLDPALQAMRAAIERRWRREQGGAPVSGVSFLGSRKPWWASVGKACLGQRGPQLTPPEQELCLQLKSSQALVASLQEQLSESRRELWAAQKLQQERAREQAREREALRGQLEAQRLEVQQCRASCKLLGREKAALEMVVEELKGKADAADAEKQGLEAEAAELQRSLLLQAERREELALRRERSCRALETSQGRLQQLEEKVSGLREELASVREALSTAQLQRDVVESEREGLRSALARAECSNADLELLVRRLKSEGVEQRDSLAAMAALMEGLAQDKSALNHLALQLEQERDQLREQRKTLEQERARAGEQLAQAEQQLALERAERRGLQQACGRLEQRQEQLEGQAALLGREKAQLQEQVGQVTCQKQALEEQLAQSLQDQEAQMGTLQQALQGKDALSEERAQLLAKQEALERQGRLAAEEAADLRVERDSLESSLLEAQQLATKLQEQLEEEARSAGLARQALQGAPRALPQLLPRKSAMEGPLEWSSVPTLEMEQLQSDWEVQEMKLRQDTVRLQRQVAQQEREAQRALESQALAHREALAQLQREKETLSLTLAEEKEVARCQLEQEKELVTKSAAEREALKGEIQSLKQERDESLLQLEHKMQQVMALSLKETERSLLSEELSRARRTLERVQQEAQSQQEQAQRGLLWSQCWLLEPSLELALSLPRTRYQACQPAGLPGELVKGSFATSAQKMEIKTVERSGRRGMPAKEHQAPDDRTANTKPALEGAIPHQPPPASRLLLPGGLATISATTEELKALQAQFEDAITAHQRETTALRESLQDLAAERGDVEREAERLRAQLTVAQEGLAALRQELQGVEESREGLHREAQEARRALSDEAREKDVLLLFNSELRATICRAEQEKASFKRSKEEKEQKLLILEEAQAALQQEASALRAHLWELEQAGGDARQELRELHRQVRTLKAENQRRSGEAHELQAQCSQEVLELRRQAAKAEAKHEGARKEVLGLQRKLAEVEAAGEAHGQRLQEHLRESRGAEQTLRAELHSVTRKLQEASGVADALQARLDQACHRIHSLEQELAQAEGARQDAEAQLGRLCSTLRRGLGLQRQSPWASPEQPGSPTKGSDSSQALPGQQGTSPPARPHSPLRWPSPTPGGRSSELMDVATVQDILRDFVQKLREAQRERDDSRIQMATLSSRLSEAECRCARAQSRVGQLQKALAEAEEGQRRVEGALSSARAARALQKEALRRLELEHLASVRAAGQEKRRLQVGQAAGTGPGDNCSAPESSLAGPRGQRTACLAEAPQGNCPQASLNPFWKEGASTVQRRQGTETGEPLLSKCPSNEGGLGEPSGGTALQVGRKAPRAAGQACAVPRGAQPRSLVALRGHQRAVSTQTSRQALSSQ

SEQ ID NO: 467 - protein, 2404 aa, Homo sapiens
MAENLLDGPPNPKRAKLSSPGFSANDSTDFGSLFDLENDLPDELIPNGGELGLLNSGNLVPDAASKHKQLSELLRGGSGSSINPGIGNVSASSPVQQGLGGQAQGQPNSANMASLSAMGKSPLSQGDSSAPSLPKQAASTSGPTPAASQALNPQAQKQVGLATSSPATSQTGPGICMNANFNQTHPGLLNSNSGHSLINQASQGQAQVMNGSLGAAGRGRGAGMPYPTPAMQGASSSVLAETLTQVSPQMTGHAGLNTAQAGGMAKMGITGNTSPFGQPFSQAGGQPMGATGVNPQLASKQSMVNSLPTFPTDIKNTSVTNVPNMSQMQTSVGIVPTQAIATGPTADPEKRKLIQQQLVLLLHAHKCQRREQANGEVRACSLPHCRTMKNVLNHMTHCQAGKACQAILGSPASGIQNTIGSVGTGQQNATSLSNPNPIDPSSMQRAYAALGLPYMNQPQTQLQPQVPGQQPAQPQTHQQMRTLNPLGNNPMNIPAGGITTDQQPPNLISESALPTSLGATNPLMNDGSNSGNIGTLSTIPTAAPPSSTGVRKGWHEHVTQDLRSHLVHKLVQAIFPTPDPAALKDRRMENLVAYAKKVEGDMYESANSRDEYYHLLAEKIYKIQKELEEKRRSRLHKQGILGNQPALPAPGAQPPVIPQAQPVRPPNGPLSLPVNRMQVSQGMNSFNPMSLGNVQLPQAPMGPRAASPMNHSVQMNSMGSVPGMAISPSRMPQPPNMMGAHTNNMMAQAPAQSQFLPQNQFPSSSGAMSVGMGQPPAQTGVSQGQVPGAALPNPLNMLGPQASQLPCPPVTQSPLHPTPPPASTAAGMPSLQHTTPPGMTPPQPAAPTQPSTPVSSSGQTPTPTPGSVPSATQTQSTPTVQAAAQAQVTPQPQTPVQPPSVATPQSSQQQPTPVHAQPPGTPLSQAAASIDNRVPTPSSVASAETNSQQPGPDVPVLEMKTETQAEDTEPDPGESKGEPRSEMMEEDLQGASQVKEETDIAEQKSEPMEVDEKKPEVKVEVKEEEESSSNGTASQSTSPSQPRKKIFKPEELRQALMPTLEALYRQDPESLPFRQPVDPQLLGIPDYFDIVKNPMDLSTIKRKLDTGQYQEPWQYVDDVWLMFNNAWLYNRKTSRVYKFCSKLAEVFEQEIDPVMQSLGYCCGRKYEFSPQTLCCYGKQLCTIPRDAAYYSYQNRYHFCEKCFTEIQGENVTLGDDPSQPQTTISKDQFEKKKNDTLDPEPFVDCKECGRKMHQICVLHYDIIWPSGFVCDNCLKKTGRPRKENKFSAKRLQTTRLGNHLEDRVNKFLRRQNHPEAGEVFVRVVASSDKTVEVKPGMKSRFVDSGEMSESFPYRTKALFAFEEIDGVDVCFFGMHVQEYGSDCPPPNTRRVYISYLDSIHFFRPRCLRTAVYHEILIGYLEYVKKLGYVTGHIWACPPSEGDDYIFHCHPPDQKIPKPKRLQEWYKKMLDKAFAERIIHDYKDIFKQATEDRLTSAKELPYFEGDFWPNVLEESIKELEQEEEERKKEESTAASETTEGSQGDSKNAKKKNNKKTNKNKSSISRANKKKPSMPNVSNDLSQKLYATMEKHKEVFFVIHLHAGPVINTLPPIVDPDPLLSCDLMDGRDAFLTLARDKHWEFSSLRRSKWSTLCMLVELHTQGQDRFVYTCNECKHHVETRWHCTVCEDYDLCINCYNTKSHAHKMVKWGLGLDDEGSSQGEPQSKSPQESRRLSIQRCIQSLVHACQCRNANCSLPSCQKMKRVVQHTKGCKRKTNGGCPVCKQLIALCCYHAKHCQENKCPVPFCLNIKHKLRQQQIQHRLQQAQLMRRRMATMNTRNVPQQSLPSPTSAPPGTPTQQPSTPQTPQPPAQPQPSPVSMSPAGFPSVARTQPPTTVSTGKPTSQVPAPPPPAQPPPAAVEAARQIEREAQQQQHLYRVNINNSMPPGRTGMGTPGSQMAPVSLNVPRPNQVSGPVMPSMPPGQWQQAPLPQQQPMPGLPRPVISMQAQAAVAGPRMPSVQPPRSISPSALQDLLRTLKSPSSPQQQQQVLNILKSNPQLMAAFIKQRTAKYVANQPGMQPQPGLQSQPGMQPQPGMHQQPSLQNLNAMQAGVPRPGVPPQQQAMGGLNPQGQALNIMNPGHNPNMASMNPQYREMLRRQLLQQQQQQQQQQQQQQQQQQGSAGMAGGMAGHGQFQQPQGPGGYPPAMQQQQRMQQHLPLQGSSMGQMAAQMGQLGQMGQPGLGADSTPNIQQALQQRILQQQQMKQQIGSPGQPNPMSPQQHMLSGQPQASHLPGQQIATSLSNQVRSPAPVQSPRPQSQPPHSSPSPRIQPQPSPHHVSPQTGSPHPGLAVTMASSIDQGHLGNPEQSAMLPQLNTPSRSALSSELSLVGDTTGDTLEKFVEGL

SEQ ID NO: 468 - protein, 2069 aa, Homo sapiens
MLKFKYGARNPLDAGAAEPIASRASRLNLFFQGKPPFMTQQQMSPLSREGILDALFVLFEECSQPALMKIKHVSNFVRKYSDTIAELQELQPSAKDFEVRSLVGCGHFAEVQVVREKATGDIYAMKVMKKKALLAQEQVSFFEEERNILSRSTSPWIPQLQYAFQDKNHLYLVMEYQPGGDLLSLLNRYEDQLDENLIQFYLAELILAVHSVHLMGYVHRDIKPENILVDRTGHIKLVDFGSAAKMNSNKMVNAKLPIGTPDYMAPEVLTVMNGDGKGTYGLDCDWWSVGVIAYEMIYGRSPFAEGTSARTFNNIMNFQRFLKFPDDPKVSSDFLDLIQSLLCGQKERLKFEGLCCHPFFSKIDWNNIRNSPPPFVPTLKSDDDTSNFDEPEKNSWVSSSPCQLSPSGFSGEELPFVGFSYSKALGILGRSESVVSGLDSPAKTSSMEKKLLIKSKELQDSQDKCHKMEQEMTRLHRRVSEVEAVLSQKEVELKASETQRSLLEQDLATYITECSSLKRSLEQARMEVSQEDDKALQLLHDIREQSRKLQEIKEQEYQAQVEEMRLMMNQLEEDLVSARRRSDLYESELRESRLAAEEFKRKATECQHKLLKAKDQGKPEVGEYAKLEKINAEQQLKIQELQEKLEKAVKASTEATELLQNIRQAKERAERELEKLQNREDSSEGIRKKLVEAEERRHSLENKVKRLETMERRENRLKDDIQTKSQQIQQMADKILELEEKHREAQVSAQHLEVHLKQKEQHYEEKIKVLDNQIKKDLADKETLENMMQRHEEEAHEKGKILSEQKAMINAMDSKIRSLEQRIVELSEANKLAANSSLFTQRNMKAQEEMISELRQQKFYLETQAGKLEAQNRKLEEQLEKISHQDHSDKNRLLELETRLREVSLEHEEQKLELKRQLTELQLSLQERESQLTALQAARAALESQLRQAKTELEETTAEAEEEIQALTAHRDEIQRKFDALRNSCTVITDLEEQLNQLTEDNAELNNQNFYLSKQLDEASGANDEIVQLRSEVDHLRREITEREMQLTSQKQTMEALKTTCTMLEEQVMDLEALNDELLEKERQWEAWRSVLGDEKSQFECRVRELQRMLDTEKQSRARADQRITESRQVVELAVKEHKAEILALQQALKEQKLKAESLSDKLNDLEKKHAMLEMNARSLQQKLETERELKQRLLEEQAKLQQQMDLQKNHIFRLTQGLQEALDRADLLKTERSDLEYQLENIQVLYSHEKVKMEGTISQQTKLIDFLQAKMDQPAKKKKGLFSRRKEDPALPTQVPLQYNELKLALEKEKARCAELEEALQKTRIELRSAREEAAHRKATDHPHPSTPATARQQIAMSAIVRSPEHQPSAMSLLAPPSSRRKESSTPEEFSRRLKERMHHNIPHRFNVGLNMRATKCAVCLDTVHFGRQASKCLECQVMCHPKCSTCLPATCGLPAEYATHFTEAFCRDKMNSPGLQTKEPSSSLHLEGWMKVPRNNKRGQQGWDRKYIVLEGSKVLIYDNEAREAGQRPVEEFELCLPDGDVSIHGAVGASELANTAKADVPYILKMESHPHTTCWPGRTLYLLAPSFPDKQRWVTALESVVAGGRVSREKAEADAKLLGNSLLKLEGDDRLDMNCTLPFSDQVVLVGTEEGLYALNVLKNSLTHVPGIGAVFQIYIIKDLEKLLMIAGEERALCLVDVKKVKQSLAQSHLPAQPDISPNIFEAVKGCHLFGAGKIENGLCICAAMPSKVVILRYNENLSKYCIRKEIETSEPCSCIHFTNYSILIGTNKFYEIDMKQYTLEEFLDKNDHSLAPAVFAASSNSFPVSIVQVNSAGQREEYLLCFHEFGVFVDSYGRRSRTDDLKWSRLPLAFAYREPYLFVTHFNSLEVIEIQARSSAGTPARAYLDIPNPRYLGPAISSGAIYLASSYQDKLRVICCKGNLVKESGTEHHRGPSTSRSSPNKRGPPTYNEHITKRVASSPAPPEGPSHPREPSTPHRYREGRTELRRDKSPGRPLEREKSPGRMLSTRRERSPGRLFEDSSRGRLPAGAVRTPLSQVNKVWDQSSV

SEQ ID NO: 469 - protein, 2145 aa, Homo sapiens
MAAFGLLSYEQRPLKRPRLGPPDVYPQDPKQKEDELTAVNVKQGFNNQPAFTGDEHGSARNIVINPSKIGAYFSSILAEKLKLNTFQDTGKKKPQVNAKDNYWLVTARSQSAIHSWFSDLAGNKPLSILAKKVPILSKKEDVFAYLAKYSVPMVRATWLIKMTCAYYSAISEAKIKKRQAPDPNLEWTQISTRYLREQLAKISDFYHMASSTGDGPVPVPPEVEQAMKQWEYNEKLAFHMFQEGMLEKHEYLTWILDVLEKIRPMDDDLLKLLLPLMLQYSDEFVQSAYLSRRLAYFCARRLSLLLSDSPNLLAAHSPHMMIGPNNSSIGAPSPGPPGPGMSPVQLAFSDFLSCAQHGPLVYGLSCMLQTVTLCCPSALVWNYSTNENKSANPGSPLDLLQVAPSSLPMPGGNTAFNQQVRARIYEVEQQIKQRGRAVEVRWSFDKCQESTAGVTISRVLHTLEVLDRHCFDRTDSSNSMETLYHKIFWANQNKDNQEVAPNDEAVVTLLCEWAVSCKRSGKHRAMAVAKLLEKRQAEIEAERCGESEVLDEKESISSSSLAGSSLPVFQNVLLRFLDTQAPSLSDPNSECEKVEFVNLVLLFCEFIRHDVFSHDAYMCTLISRGDLSVTASTRPRSPVGENADEHYSKDHDVKMEIFSPMPGESCENANTSLGRRMSVNCEKLVKREKPRELIFPSNYDLLRHLQYATHFPIPLDESSSHECNQRTILLYGVGKERDEARHQLKKITKDILKILNKKSTTETGVGDEGQKARKNKQETFPTLETVFTKLQLLSYFDQHQVTSQISNNVLEQITSFASGTSYHLPLAHHIQLIFDLMEPALNINGLIDFAIQLLNELSVVEAELLLKSSSLAGSYTTGLCVCIVAVLRRYHSCLILNPDQTAQVFEGLCGVVKHVVNPSECSSPERCILAYLYDLYVSCSHLRSKFGDLFSSACSKVKQTIYNNVMPANSNLRWDPDFMMDFIENPSARSINYSMLGKILSDNAANRYSFVCNTLMNVCMGHQDAGRINDIANFSSELTACCTVLSSEWLGVLKALCCSSNHVWGFNDVLCTVDVSDLSFHDSLATFIAILIARQCFSLEDVVQHVALPSLLAAACGDADAEPGARMTCRLLLHLFRAPQACFLPQATGKPFPGIRSSCDRHLLAAAHNSIEVGAVFAVLKAIMMLGDAKIGNNSVSSLKNDDFTMRGLRCDGNADDIWTASQNPKSCGKSISIETANLREYARYVLRTICQQEWVGEHCLKEPERLCTDKELILDPVLSNMQAQKLLQLICYPHGIKECTEGDNLQRQHIKRILQNLEQWTLRQSWLELQLMIKQCLKDPGSGSVAEMNNLLDNIAKATIEVFQQSADLNNSSNSGMSLFNPNSIGSADTSSTRQNGIKTFLSSSERRGVWLVAPLIARLPTSVQGRVLKAAGEELEKGQHLGSSSKKERDRQKQKSMSLLSQQPFLSLVLTCLKGQDEQREGLLTSLQNQVNQILSNWREERYQDDIKARQMMHEALQLRLNLVGGMFDTVQRSTQWTTDWALLLLQIITSGTVDMHTNNELFTTVLDMLGVLINGTLASDLSNASPGGSEENKRAYMNLVKKLKKELGDKRSESIDKVRQLLPLPKQTCDVITCEPMGSLIDTKGNKIAGFDSIDKKQGLQVSTKQKVSPWDLFEGQKNPAPLSWAWFGTVRVDRRVIKYEEQHHLLLYHTHPMPKPRSYYLQPLPLPPEEEEEEPTSPVSQEPERKSAELSDQGKTTTDEEKKTKGRKRKTKSSSRVDEYPQSNIYRVPPNYSPISSQMMHHPQSTLWGYNLVGQPQQPGFFLQNQSLTPGGSRLDPAGSFVPTNTKQALSNMLQRRSGAMMQPPSLHAITSQQQLIQMKLLQQQQQQRLLRQAQTRPFQQGQPGDQAALFAAQARPSPQLPQYPGLQQAQTMPQGYTMYGTQMPLQQTSQQQAGSVVLSPSYNSRAYPAAHSNPVLMERLRQIQQQPSGYVQQQASPYLQPLTGSQRLNHQALQQSPLVGGGIDAVLTSAHPNLPSVPLPQDPMRPRQPQVRQQQRLLQMQQPQQPQPQQPPQPQQSSQSQSQTLGLQAMQPQQPLFPRQGLQQTQQQQQTAALVRQLQKQLSSNQPQQGVTPYGHPSHF

SEQ ID NO: 470 - protein, 2279 aa, Homo sapiens
MYRSSARSSVSSHRPKDDGGGGPRSGRSSGSSSGPARRSSPPPPPSGSSSRTPARRPRSPSGHRGRRASPSPPRGRRVSPSPPRARRGSPSPPRGRRLFPPGPAGFRGSSRGESRADYARDGRGDHPGDSGSRRRSPGLCSDSLEKSLRITVGNDHFCVSTPERRRLSDRLGSPVDNLEDMDRDDLTDDSVFTRSSQCSRGLERYISQEEGPLSPFLGQLDEDYRTKETFLHRSDYSPHISCHDELLRGTERNREKLKGYSIRSEERSREAKRPRYDDTVKINSMGGDHPSFTSGTRNYRQRRRSPSPRFLDPEFRELDLARRKREEEEERSRSLSQELVGVDGGGTGCSIPGLSGVLTASEPGYSLHRPEEVSVMPKKSILKKRIEVDIMEPSMQLESFSSSTSSSQDHPLYSGHPSLPLSGAIAAFASEIENKGTMVETALKEPQGNLYQWGPLPGIPKDNSPLREKFGSFLCHKDNLDLKAEGPERHTDFLLPHERASQDGSGFSRILSMLADSTSTQEKRRRSFPDIEDEEKFLYGDEEEDLKAESVPKPLGSSESEVMRQKASSLPSSAPAVKLESLEETNPEYAKIHDLLKTIGLDIGVAEISQLAARTQERLHGKKPSLRSSADRRSSVDRYFSADHCSSVDHRFSADRCSSVDHCFSADRRSSDPHRLESREAHHSNTHSPEVSHPHPPSPVDPYLLTKNSPPFLKSDHPVGHISGPEVVGSGFQSSVAVRCMLPSAPSAPIRLPHTAALSQFHMPRASQFAAARIPPNYQGPAIPPASFDAYRHYMAYAASRWPMYPTSQPSNHPVPEPHRIMPITKQATRSRPNLRVIPTVTPDKPKQKESLRGSIPAAQVPVQVSIPSLIRYNPEKISDEKNRASQKQKVIEEREKLKNDREARQKKMYYLRTELERLHKQQGEMLRKKRREKDGHKDPLLVEVSRLQDNIMKDIAELRQEAEEAEKKQSELDKVAQILGINIFDKSQKSLSDSREPTEKPGKAEKSKSPEKVSSFSNSSSNKESKVNNEKFRTKSPKPAESPQSATKQLDQPTAAYEYYDAGNHWCKDCNTICGTMFDFFTHMHNKKHTQTLDPYNRPWASKTQSEAKQDAIKRTDKITVPAKGSEFLVPISGFYCQLCEEFLGDPISGEQHVKGHQHNEKYKKYVDENPLYEERRNLDRQAGLAVVLETERRRQSELKRKLSEKPKEEKKEKKAKAVKEVKEDDKVSEKLEDQLSEGRNSPEKAENKRNTGIKLQLKEEVKKESPTSSSFGKFSWKKPEKEEEKSSLVTPSISKEEILESSKDKEDGKTEAGKAKPIKIKLSGKTVVAHTSPWMPVVTTSTQTKIRPNLPIPSTVLRKSCSATMSKPAPLNTFLSIKSSGTTAKPLPVVKESSADLLLPPDIISKAFGGEEVILKGSPEEKVVLAEKSEPSHLPEQILPPPPPPPPPPPPPPPVIPHPAAPSAAQANAILAPVKSNPVVSQTLSPGFVGPNILNPVLPVAIMASAQPAAIPSDETAPGVSESDRDQTLFSVLVRPPPPLSSVFSEQAKKLEKRNSCLATANAKDLYDIFYSSGGKGAPETKGAPETKLSGGPLANGENSNLSRTKSSDTSSTSPLNSSASQEELHQDEGLVAAPIVSNSEKPIAKTLVALGKWSVVEHVGPKSTGSTYGFLQPLTRLCQSRPYETITPKTDTLAIWTSSSFQSDTSRDISPEKSELDLGEPGPPGVEPPPQLLDIQCKESQKLVEIHLRESVNQDKESQELRKSEDCRESEIETNTELKERVKELSEGIVDEGVSTSIGPHSIDDSNLNHGNRYMWEGEVKQPNLLMIDKEAEQSNKLMTGSETPSKVVIKLSPQACSFTKAKLDSFLSEARSLLNPQDTPVKISAPELLLHSPARSAMCLTGSPQEQGVSVVSEEGLENSAPESASRTSRYRSLKLKRERSKDFQVKKIYELAVWDENKKRPETWESPEKPKTEALELQDVHPELTVTIESKALEDFEATDLKVEELTALGNLGDMPVDFCTTRVSPAHRSPTVLCQKVCEENSVSPIGCNSSDPADFEPIPSFSGFPLDSPKTLVLDFETEGERNSPNPRSVRIPSPNILKTGLTENVDRGLGGLEGTHQALDLLAGGMMPEEVKESSQLDKQESLGLELKTINSAGLGPSPCLPDLVDFVTRTSGVQKDKLCSPLSEPGDPSKCSSLELGPLQLEISNASTTEVAILQVDDDSGDPLNLVKAPVSRSPPREQVIEDNMVPQGMPEQETTVGAIQDHTESSVHN

SEQ ID NO: 471 - protein, 2136 aa, Homo sapiens
MSRSRHARPSRLVRKEDVNKKKKNSQLRKTTKGANKNVASVKTLSPGKLKQLIQERDVKKKTEPKPPVPVRSLLTRAGAARMNLDRTEVLFQNPESLTCNGFTMALRSTSLSRRLSQPPLVVAKSKKVPLSKGLEKQHDCDYKILPALGVKHSENDSVPMQDTQVLPDIETLIGVQNPSLLKGKSQETTQFWSQRVEDSKINIPTHSGPAAEILPGPLEGTRCGEGLFSEETLNDTSGSPKMFAQDTVCAPFPQRATPKVTSQGNPSIQLEELGSRVESLKLSDSYLDPIKSEHDCYPTSSLNKVIPDLNLRNCLALGGSTSPTSVIKFLLAGSKQATLGAKPDHQEAFEATANQQEVSDTTSFLGQAFGAIPHQWELPGADPVHGEALGETPDLPEIPGAIPVQGEVFGTILDQQETLGMSGSVVPDLPVFLPVPPNPIATFNAPSKWPEPQSTVSYGLAVQGAIQILPLGSGHTPQSSSNSEKNSLPPVMAISNVENEKQVHISFLPANTQGFPLAPERGLFHASLGIAQLSQAGPSKSDRGSSQVSVTSTVHVVNTTVVTMPVPMVSTSSSSYTTLLPTLEKKKRKRCGVCEPCQQKTNCGECTYCKNRKNSHQICKKRKCEELKKKPSVVVPLEVIKENKRPQREKKPKVLKADFDNKPVNGPKSESMDYSRCGHGEEQKLELNPHTVENVTKNEDSMTGIEVEKWTQNKKSQLTDHVKGDFSANVPEAEKSKNSEVDKKRTKSPKLFVQTVRNGIKHVHCLPAETNVSFKKFNIEEFGKTLENNSYKFLKDTANHKNAMSSVATDMSCDHLKGRSNVLVFQQPGFNCSSIPHSSHSIINHHASIHNEGDQPKTPENIPSKEPKDGSPVQPSLLSLMKDRRLTLEQVVAIEALTQLSEAPSENSSPSKSEKDEESEQRTASLLNSCKAILYTVRKDLQDPNLQGEPPKLNHCPSLEKQSSCNTVVFNGQTTTLSNSHINSATNQASTKSHEYSKVTNSLSLFIPKSNSSKIDTNKSIAQGIITLDNCSNDLHQLPPRNNEVEYCNQLLDSSKKLDSDDLSCQDATHTQIEEDVATQLTQLASIIKINYIKPEDKKVESTPTSLVTCNVQQKYNQEKGTIQQKPPSSVHNNHGSSLTKQKNPTQKKTKSTPSRDRRKKKPTVVSYQENDRQKWEKLSYMYGTICDIWIASKFQNFGQFCPHDFPTVFGKISSSTKIWKPLAQTRSIMQPKTVFPPLTQIKLQRYPESAEEKVKVEPLDSLSLFHLKTESNGKAFTDKAYNSQVQLTVNANQKAHPLTQPSSPPNQCANVMAGDDQIRFQQVVKEQLMHQRLPTLPGISHETPLPESALTLRNVNVVCSGGITVVSTKSEEEVCSSSFGTSEFSTVDSAQKNFNDYAMNFFTNPTKNLVSITKDSELPTCSCLDRVIQKDKGPYYTHLGAGPSVAAVREIMENRYGQKGNAIRIEIVVYTGKEGKSSHGCPIAKWVLRRSSDEEKVLCLVRQRTGHHCPTAVMVVLIMVWDGIPLPMADRLYTELTENLKSYNGHPTDRRCTLNENRTCTCQGIDPETCGASFSFGCSWSMYFNGCKFGRSPSPRRFRIDPSSPLHEKNLEDNLQSLATRLAPIYKQYAPVAYQNQVEYENVARECRLGSKEGRPFSGVTACLDFCAHPHRDIHNMNNGSTVVCTLTREDNRSLGVIPQDEQLHVLPLYKLSDTDEFGSKEGMEAKIKSGAIEVLAPRRKKRTCFTQPVPRSGKKRAAMMTEVLAHKIRAVEKKPIPRIKRKNNSTTTNNSKPSSLPTLGSNTETVQPEVKSETEPHFILKSSDNTKTYSLMPSAPHPVKEASPGFSWSPKTASATPAPLKNDATASCGFSERSSTPHCTMPSGRLSGANAAAADGPGISQLGEVAPLPTLSAPVMEPLINSEPSTGVTEPLTPHQPNHQPSFLTSPQDLASSPMEEDEQHSEADEPPSDEPLSDDPLSPAEEKLPHIDEYWSDSEHIFLDANIGGVAIAPAHGSVLIECARRELHATTPVEHPNRNHPTRLSLVFYQHKNLNKPQHGFELNKIKFEAKEAKNKKMKASEQKDQAANEGPEQSSEVNELNQIPSHKALTLTHDNVVTVSPYALTHVAGPYNHWV

SEQ ID NO: 472 - protein, 1785 aa, Homo sapiens
MQESQTKSMFVSRALEKILADKEVKRPQHSQLRRACQVALDEIKAEIEKQRLGTAAPPKANFIEADKYFLPFELACQSKSPRVVSTSLDCLQKLIAYGHITGNAPDSGAPGKRLIDRIVETICSCFQGPQTDEGVQLQIIKALLTAVTSPHIEIHEGTILQTVRTCYNIYLASKNLINQTTAKATLTQMLNVIFTRMENQVLQEARELEKPIQSKPQSPVIQAAAVSPKFVRLKHSQAQSKPTTPEKTDLTNGEHARSDSGKVSTENGDAPRERGSSLSGTDDGAQEVVKDILEDVVTSAIKEAAEKHGLTEPERVLGELECQECAIPPGVDENSQTNGIADDRQSLSSADNLESDAQGHQVAARFSHVLQKDAFLVFRSLCKLSMKPLGEGPPDPKSHELRSKVVSLQLLLSVLQNAGPVFRTHEMFINAIKQYLCVALSKNGVSSVPDVFELSLAIFLTLLSNFKMHLKMQIEVFFKEIFLNILETSTSSFEHRWMVIQTLTRICADAQCVVDIYVNYDCDLNAANIFERLVNDLSKIAQGRSGHELGMTPLQELSLRKKGLECLVSILKCMVEWSKDLYVNPNHQTSLGQERLTDQEIGDGKGLDMARRCSVTSMESTVSSGTQTTVQDDPEQFEVIKQQKEIIEHGIELFNKKPKRGIQFLQEQGMLGTSVEDIAQFLHQEERLDSTQVGDFLGDSARFNKEVMYAYVDQLDFCEKEFVSALRTFLEGFRLPGEAQKIDRLMEKFAARYIECNQGQTLFASADTAYVLAYSIIMLTTDLHSPQVKNKMTKEQYIKMNRGINDSKDLPEEYLSSIYEEIEGKKIAMKETKELTIATKSTKQNVASEKQRRLLYNLEMEQMAKTAKALMEAVSHAKAPFTSATHLDHVRPMFKLVWTPLLAAYSIGLQNCDDTEVASLCLEGIRCAIRIACIFGMQLERDAYVQALARFSLLTASSSITEMKQKNIDTIKTLITVAHTDGNYLGNSWHEILKCISQLELAQLIGTGVKTRYLSGSGREREGSLKGHTLAGEEFMGLGLGNLVSGGVDKRQMASFQESVGETSSQSVVVAVDRIFTGSTRLDGNAIVDFVRWLCAVSMDELASPHHPRMFSLQKIVEISYYNMNRIRLQWSRIWHVIGDHFNKVGCNPNEDVAIFAVDSLRQLSMKFLEKGELANFRFQKDFLRPFEHIMKKNRSPTIRDMAIRCIAQMVNSQAANIRSGWKNIFAVFHQAASDHDGNIVELAFQTTCHIVTTIFQHHFPAAIDSFQDAVKCLSEFACNAAFPDTSMEAIRLIRFCGKYVSERPRVLQEYTSDDMNVAPGDRVWVRGWFPILFELSCIINRCKLDVRTRGLTVMFEIMKSYGHTFEKHWWQDLFRIVFRIFDNMKLPEQLSEKSEWMTTTCNHALYAICDVFTQFYEALNEVLLSDVFAQLQWCVKQDNEQLARSGTNCLENLVISNGEKFSPEVWDETCNCMLDIFKTTIPHVLLTWRPVGMEEDSSEKHLDVDLDRQSLSSIDKNPSERGQSQLSNPTDDSWKGRPYANQKLFASLLIKCVVQLELIQTIDNIVFYPATSKKEDAEHMVAAQQDTLDADIHIETEDQGMYKYMSSQHLFKLLDCLQESHSFSKAFNSNYEQRTVLWRAGFKGKSKPNLLKQETSSLACCLRILFRMYVDENRRDSWEEIQQRLLTVCSEALAYFITVNSESHREAWTSLLLLLLTKTLKINDEKFKAHASMYYPYLCEIMQFDLIPELRAVLRKFFLRIGVVYKIWIPEEPSQVPAALSPVW

SEQ ID NO: 473 - protein, 1749 aa, Homo sapiens
MHLKHLRTLLSPQDGAAKVTCMAWSQNNAKFAVCTVDRVVLLYDEHGERRDKFSTKPADMKYGRKSYMVKGMAFSPDSTKIAIGQTDNIIYVYKIGEDWGDKKVICNKFIQTSAVTCLQWPAEYIIVFGLAEGKVRLANTKTNKSSTIYGTESYVVSLTTNCSGKGILSGHADGTIVRYFFDDEGSGESQGKLVNHPCPPYALAWATNSIVAAGCDRKIVAYGKEGHMLQTFDYSRDPQEREFTTAVSSPGGQSVVLGSYDRLRVFNWIPRRSIWEEAKPKEITNLYTITALAWKRDGSRLCVGTLCGGVEQFDCCLRRSIYKNKFELTYVGPSQVIVKNLSSGTRVVLKSHYGYEVEEVKILGKERYLVAHTSETLLLGDLNTNRLSEIAWQGSGGNEKYFFENENVCMIFNAGELTLVEYGNNDTLGSVRTEFMNPHLISVRINERCQRGTEDNKKLAYLIDIKTIAIVDLIGGYNIGTVSHESRVDWLELNETGHKLLFRDRKLRLHLYDIESCSKTMILNFCSYMQWVPGSDVLVAQNRNSLCVWYNIEAPERVTMFTIRGDVIGLERGGGKTEVMVMEGVTTVAYTLDEGLIEFGTAIDDGNYIRATAFLETLEMTPETEAMWKTLSKLALEARQLHIAERCFSALGQVAKARFLHETNEIADQVSREYGGEGTDFYQVRARLAMLEKNYKLAEMIFLEQNAVEEAMGMYQELHRWDECIAVAEAKGHPALEKLRRSYYQWLMDTQQEERAGELQESQGDGLAAISLYLKAGLPAKAARLVLTREELLANTELVEHITAALIKGELYERAGDLFEKIHNPQKALECYRKGNAFMKAVELARLAFPVEVVKLEEAWGDHLVQQKQLDAAINHYIEARCSIKAIEAALGARQWKKAIYILDLQDRNTASKYYPLVAQHYASLQEYEIAEELYTKGDRTKDAIDMYTQAGRWEQAHKLAMKCMRPEDVSVLYITQAQEMEKQGKYREAERLYVTVQEPDLAITMYKKHKLYDDMIRLVGKHHPDLLSDTHLHLGKELEAEGRLQEAEYHYLEAQEWKATVNMYRASGLWEEAYRVARTQGGANAHKHVAYLWAKSLGGEAAVRLLNKLGLLEAAVDHAADNCSFEFAFELSRLALKHKTPEVHLKYAMFLEDEGKFEEAEAEFIRAGKPKEAVLMFVHNQDWEAAQRVAEAHDPDSVAEVLVGQARGALEEKDFQKAEGLLLRAQRPGLALNYYKEAGLWSDALRICKDYVPSQLEALQEEYEREATKKGARGVEGFVEQARHWEQAGEYSRAVDCYLKVRDSGNSGLAEKCWMKAAELSIKFLPPQRNMEVVLAVGPQLIGIGKHSAAAELYLNLDLVKEAIDAFIEGEEWNKAKRVAKELDPRYEDYVDQHYKEFLKNQGKVDSLVGVDVIAALDLYVEQGQWDKCIETATKQNYKILHKYVALYATHLIREGSSAQALALYVQHGAPANPQNFNIYKRIFTDMVSSPGTNCAEAYHSWADLRDVLFNLCENLVKSSEANSPAHEEFKTMLLIAHYYATRSAAQSVKQLETVAARLSVSLLRHTQLLPVDKAFYEAGIAAKAVGWDNMAFIFLNRFLDLTDAIEEGTLDGLDHSDFQDTDIPFEVPLPAKQHVPEAEREEVRDWVLTVSMDQRLEQVLPRDERGAYEASLVAASTGVRALPCLITGYPILRNKIEFKRPGKAANKDNWNKFLMAIKTSHSPVCQDVLKFISQWCGGLPSTSFSFQ

SEQ ID NO: 474 - protein, 1604 aa, Homo sapiens
MWVSWAPGLWLLGLWATFGHGANTGAQCPPSQQEGLKLEHSSSLPANVTGFNLIHRLSLMKTSAIKKIRNPKGPLILRLGAAPVTQPTRRVFPRGLPEEFALVLTLLLKKHTHQKTWYLFQVTDANGYPQISLEVNSQERSLELRAQGQDGDFVSCIFPVPQLFDLRWHKLMLSVAGRVASVHVDCSSASSQPLGPRRPMRPVGHVFLGLDAEQGKPVSFDLQQVHIYCDPELVLEEGCCEILPAGCPPETSKARRDTQSNELIEINPQSEGKVYTRCFCLEEPQNSEVDAQLTGRISQKAERGAKVHQETAADECPPCVHGARDSNVTLAPSGPKGGKGERGLPGPPGSKGEKGARGNDCVRISPDAPLQCAEGPKGEKGESGALGPSGLPGSTGEKGQKGEKGDGGIKGVPGKPGRDGRPGEICVIGPKGQKGDPGFVGPEGLAGEPGPPGLPGPPGIGLPGTPGDPGGPPGPKGDKGSSGIPGKEGPGGKPGKPGVKGEKGDPCEVCPTLPEGFQNFVGLPGKPGPKGEPGDPVPARGDPGIQGIKGEKGEPCLSCSSVVGAQHLVSSTGASGDVGSPGFGLPGLPGRAGVPGLKGEKGNFGEAGPAGSPGPPGPVGPAGIKGAKGEPCEPCPALSNLQDGDVRVVALPGPSGEKGEPGPPGFGLPGKQGKAGERGLKGQKGDAGNPGDPGTPGTTGRPGLSGEPGVQGPAGPKGEKGDGCTACPSLQGTVTDMAGRPGQPGPKGEQGPEGVGRPGKPGQPGLPGVQGPPGLKGVQGEPGPPGRGVQGPQGEPGAPGLPGIQGLPGPRGPPGPTGEKGAQGSPGVKGATGPVGPPGASVSGPPGRDGQQGQTGLRGTPGEKGPRGEKGEPGECSCPSQGDLIFSGMPGAPGLWMGSSWQPGPQGPPGIPGPPGPPGVPGLQGVPGNNGLPGQPGLTAELGSLPIEQHLLKSICGDCVQGQRAHPGYLVEKGEKGDQGIPGVPGLDNCAQCFLSLERPRAEEARGDNSEGDPGCVGSPGLPGPPGLPGQRGEEGPPGMRGSPGPPGPIGPPGFPGAVGSPGLPGLQGERGLTGLTGDKGEPGPPGQPGYPGATGPPGLPGIKGERGYTGSAGEKGEPGPPGSEGLPGPPGPAGPRGERGPQGNSGEKGDQGFQGQPGFPGPPGPPGFPGKVGSPGPPGPQAEKGSEGIRGPSGLPGSPGPPGPPGIQGPAGLDGLDGKDGKPGLRGDPGPAGPPGLMGPPGFKGKTGHPGLPGPKGDCGKPGPPGSTGRPGAEGEPGAMGPQGRPGPPGHVGPPGPPGQPGPAGISAVGLKGDRGATGERGLAGLPGQPGPPGHPGPPGEPGTDGAAGKEGPPGKQGFYGPPGPKGDPGAAGQKGQAGEKGRAGMPGGPGKSGSMGPVGPPGPAGERGHPGAPGPSGSPGLPGVPGSMGDMVNYDEIKRFIRQEIIKMFDERMAYYTSRMQFPMEMAAAPGRPGPPGKDGAPGRPGAPGSPGLPGQIGREGRQGLPGVRGLPGTKGEKGDIGIGIAGENGLPGPPGPQGPPGYGKMGATGPMGQQGIPGIPGPPGPMGQPGKAGHCNPSDCFGAMPMEQQYPPMKTMKGPFG

SEQ ID NO: 475 - protein, 2390 aa, Homo sapiens
MSSTLSPTDFDSLEIQGQYSDINNRWDLPDSDWDNDSSSARLFERSRIKALADEREAVQKKTFTKWVNSHLARVTCRVGDLYSDLRDGRNLLRLLEVLSGEILPKPTKGRMRIHCLENVDKALQFLKEQKVHLENMGSHDIVDGNHRLTLGLVWTIILRFQIQDISVETEDNKEKKSAKDALLLWCQMKTAGYPNVNVHNFTTSWRDGLAFNAIVHKHRPDLLDFESLKKCNAHYNLQNAFNLAEKELGLTKLLDPEDVNVDQPDEKSIITYVATYYHYFSKMKALAVEGKRIGKVLDHAMEAERLVEKYESLASELLQWIEQTIVTLNDRQLANSLSGVQNQLQSFNSYRTVEKPPKFTEKGNLEVLLFTIQSKLRANNQKVYTPREGRLISDINKAWERLEKAEHERELALRTELIRQEKLEQLAARFDRKAAMRETWLSENQRLVSQDNFGLELAAVEAAVRKHEAIETDIVAYSGRVQAVDAVAAELAAERYHDIKRIAARQHNVARLWDFLRQMVAARRERLLLNLELQKVFQDLLYLMDWMEEMKGRLQSQDLGRHLAGVEDLLQLHELVEADIAVQAERVRAVSASALRFCNPGKEYRPCDPQLVSERVAKLEQSYEALCELAAARRARLEESRRLWRFLWEVGEAEAWVREQQHLLASADTGRDLTGALRLLNKHTALRGEMSGRLGPLKLTLEQGQQLVAEGHPGASQASARAAELQAQWERLEALAEERAQRLAQAASLYQFQADANDMEAWLVDALRLVSSPELGHDEFSTQALARQHRALEEEIRSHRPTLDALREQAAALPPTLSRTPEVQGRVPTLERHYEELQARAGERARALEAALALYTMLSEAGACGLWVEEKEQWLNGLALPERLEDLEVVQQRFETLEPEMNTLAAQITAVNDIAEQLLKANPPGKDRIVNTQEQLNHRWQQFRRLADGKKAALTSALSIQNYHLECTETQAWMREKTKVIESTQGLGNDLAGVLALQRKLAGTERDLEAIAARVGELTREANALAAGHPAQAVAINARLREVQTGWEDLRATMRRREESLGEARRLQDFLRSLDDFQAWLGRTQTAVASEEGPATLPEAEALLAQHAALRGEVERAQSEYSRLRALGEEVTRDQADPQCLFLRQRLEALGTGWEELGRMWESRQGRLAQAHGFQGFLRDARQAEGVLSSQEYVLSHTEMPGTLQAADAAIKKLEDFMSTMDANGERIHGLLEAGRQLVSEGNIHADKIREKADSIERRHKKNQDAAQQFLGRLRDNREQQHFLQDCHELKLWIDEKMLTAQDVSYDEARNLHTKWQKHQAFMAELAANKDWLDKVDKEGRELTLEKPELKALVSEKLRDLHRRWDELETTTQAKARSLFDANRAELFAQSCCALESWLESLQAQLHSDDYGKDLTSVNILLKKQQMLEWEMAVREKEVEAIQAQAKALAQEDQGAGEVERTSRAVEEKFRALCQPMRERCRRLQASREQHQFHRDVEDEILWVTERLPMASSMEHGKDLPSVQLLMKKNQTLQKEIQGHEPRIADLRERQRALGAAAAGPELAELQEMWKRLGHELELRGKRLEDALRAQQFYRDAAEAEAWMGEQELHMMGQEKAKDELSAQAEVKKHQVLEQALADYAQTIHQLAASSQDMIDHEHPESTRISIRQAQVDKLYAGLKELAGERRERLQEHLRLCQLRRELDDLEQWIQEREVVAASHELGQDYEHVTMLRDKFREFSRDTSTIGQERVDSANALANGLIAGGHAARATVAEWKDSLNEAWADLLELLDTRGQVLAAAYELQRFLHGARQALARVQHKQQQLPDGTGRDLNAAEALQRRHCAYEHDIQALSPQVQQVQDDGHRLQKAYAGDKAEEIGRHMQAVAEAWAQLQGSSAARRQLLLDTTDKFRFFKAVRELMLWMDEVNLQMDAQERPRDVSSADLVIKNQQGIKAEIEARADRFSSCIDMGKELLARSHYAAEEISEKLSQLQARRQETAEKWQEKMDWLQLVLEVLVFGRDAGMAEAWLCSQEPLVRSAELGCTVDEVESLIKRHEAFQKSAVAWEERFCALEKLTALEEREKERKRKREEEERRKQPPAPEPTASVPPGDLVGGQTASDTTWDGTQPRPPPSTQAPSVNGVCTDGEPSQPLLGQQRLEHSSFPEGPGPGSGDEANGPRGERQTRTRGPAPSAMPQSRSTESAHAATLPPRGPEPSAQEQMEGMLCRKQEMEAFGKKAANRSWQNVYCVLRRGSLGFYKDAKAASAGVPYHGEVPVSLARAQGSVAFDYRKRKHVFKLGLQDGKEYLFQAKDEAEMSSWLRVVNAAIATASSASGEPEEPVVPSTTRGMTRAMTMPPVSPVGAEGPVVLRSKDGREREREKRFSFFKKNK

SEQ ID NO: 476 - protein, 1190 aa, Homo sapiens
MEGTEAAAAKPAGGSPQGPKTGSGTASPVEGTSAVEWSGPEPQLDNGHPPRPWPCPQENRTSSLMAPQPPRVWGVQLQGPSVLESKVRALKEKMTVAKQGVSPCSASQEWSSPKKPQCRRGKAGRAGTPSEGSFLPGAVVAPRTQNLPDGQLDGSINEEQPARDGGPRLPRPPAPGREYCNRGSPWPPEAEWTLPDHDRGPLLGPSSLQQSPIHGVTPGRPGGPGHCNKIIHIPSPRTGRSYPFPDGVVTEADLDSTSLTSEEVFVPRTALLGERWRAGDLEALGAGSSVLSLSDRVERNRLLLQEMLNVSGQSPRKVGTPAWTPSWDTAAPERPVGDVDWASGTSLQDSGQNRTVGPNPEPVLSPRHEEATHLLQRARMKARTRPLRASHDIVPTITQGSRDGHRSPARDPRTTPACRDSLQNGHTSDSSSGESSGGHRPRRGPSPSHVRFEDESAREAEFRHLERLQQRQRQVLSTVLQAADQGPLRSKPDLADYINGAPRLRDAGQGTFHRLVGSLDRRGHPAPPAPGSERRCQACGSCIDDPRPAQGKAPPVPRTLQELQAACGMERVLGGLSSPLRLLPAEPRLHMEWIRETHIGDTVCPAEVDSALDSTDNSDNCRTDSEEAGTSQAGWACGRTQGSSPRLRLRGSRPRGHRWSKKAEAELPWGLQAQQHLPRADDVEVENEVKEGRGHTPEGTLFLREDAKPPDLELKRVSLGPQWQPGPGLGSHQPHPLDSRTPCRTAYATTAPMTPESSGPGGQAQVTESHESLEIVSPSSLQQSHAEPSAPHQAWQPTASLCPEGWAPTPPPSRKTTSPVSHRKAALAGLLRLGDQTEPVGIPRPPSRSAVLRTCELPPSQTQPSRPQVRHPLLALSTNNCNNSAPRGLQEPYGGAVHEGRVERGPCSREPEPPLENSRDGGPQGFLGSADVATINSTGITLSLSSEESESSKESEGSLQRTGSGSGGHVLSRASAGAGTGPGSPSAAPLDQNKKRSSSIASTLGLKKLFSALGQSSRPKLGKSRSYSVEQLQPAPPGLTSQSRAPSLQSLHPVSPSHQRRKAASFQNLHSLLSSKGNRSSLYLVAGPGDHSAAGRPAKTSPRRALSVEDVGAPSLARTVGRLVEVFPDGTSQLQLQRSPGGTFGFCVASGNGRPDSGMPSPLPQPHGWGGLSKQGRAFWLWSEAFLVFG

SEQ ID NO: 477 - protein, 2804 aa, Homo sapiens
MNGDMPHVPITTLAGIASLTDLLNQLPLPSPLPATTTKSLLFNARIAEEVNCLLACRDDNLVSQLVHSLNQVSTDHIELKDNLGSDDPEGDIPVLLQAVLARSPNVFREKSMQNRYVQSGMMMSQYKLSQNSMHSSPASSNYQQTTISHSPSSRFVPPQTSSGNRFMPQQNSPVPSPYAPQSPAGYMPYSHPSSYTTHPQMQQASVSSPIVAGGLRNIHDNKVSGPLSGNSANHHADNPRHGSSEDYLHMVHRLSSDDGDSSTMRNAASFPLRSPQPVCSPAGSEGTPKGSRPPLILQSQSLPCSSPRDVPPDILLDSPERKQKKQKKMKLGKDEKEQSEKAAMYDIISSPSKDSTKLTLRLSRVRSSDMDQQEDMISGVENSNVSENDIPFNVQYPGQTSKTPITPQDINRPLNAAQCLSQQEQTAFLPANQVPVLQQNTSVAAKQPQTSVVQNQQQISQQGPIYDEVELDALAEIERIERESAIERERFSKEVQDKDKPLKKRKQDSYPQEAGGATGGNRPASQETGSTGNGSRPALMVSIDLHQAGRVDSQASITQDSDSIKKPEEIKQCNDAPVSVLQEDIVGSLKSTPENHPETPKKKSDPELSKSEMKQSESRLAESKPNENRLVETKSSENKLETKVETQTEELKQNESRTTECKQNESTIVEPKQNENRLSDTKPNDNKQNNGRSETTKSRPETPKQKGESRPETPKQKSDGHPETPKQKGDGRPETPKQKGESRPETPKQKNEGRPETPKHRHDNRRDSGKPSTEKKPEVSKHKQDTKSDSPRLKSERAEALKQRPDGRSVSESLRRDHDNKQKSDDRGESERHRGDQSRVRRPETLRSSSRNEHGIKSDSSKTDKLERKHRHESGDSRERPSSGEQKSRPDSPRVKQGDSNKSRSDKLGFKSPTSKDDKRTEGNKSKVDTNKAHPDNKAEFPSYLLGGRSGALKNFVIPKIKRDKDGNVTQETKKMEMKGEPKDKVEKIGLVEDLNKGAKPVVVLQKLSLDDVQKLIKDREDKSRSSLKPIKNKPSKSNKGSIDQSVLKELPPELLAEIESTMPLCERVKMNKRKRSTVNEKPKYAEISSDEDNDSDEAFESSRKRHKKDDDKAWEYEERDRRSSGDHRRSGHSHEGRRSSGGGRYRNRSPSDSDMEDYSPPPSLSEVARKMKKKEKQKKRKAYEPKLTPEEMMDSSTFKRFTASIENILDNLEDMDFTAFGDDDEIPQELLLGKHQLNELGSESAKIKAMGIMDKLSTDKTVKVLNILEKNIQDGSKLSTLLNHNNDTEEEERLWRDLIMERVTKSADACLTTINIMTSPNMPKAVYIEDVIERVIQYTKFHLQNTLYPQYDPVYRLDPHGGGLLSSKAKRAKCSTHKQRVIVMLYNKVCDIVSSLSELLEIQLLTDTTILQVSSMGITPFFVENVSELQLCAIKLVTAVFSRYEKHRQLILEEIFTSLARLPTSKRSLRNFRLNSSDMDGEPMYIQMVTALVLQLIQCVVHLPSSEKDSNAEEDSNKKIDQDVVITNSYETAMRTAQNFLSIFLKKCGSKQGEEDYRPLFENFVQDLLSTVNKPEWPAAELLLSLLGRLLVHQFSNKSTEMALRVASLDYLGTVAARLRKDAVTSKMDQGSIERILKQVSGGEDEIQQLQKALLDYLDENTETDPSLVFSRKFYIAQWFRDTTLETEKAMKSQKDEESSEGTHHAKEIETTGQIMHRAENRKKFLRSIIKTTPSQFSTLKMNSDTVDYDDACLIVRYLASMRPFAQSFDIYLTQILRVLGENAIAVRTKAMKCLSEVVAVDPSILARLDMQRGVHGRLMDNSTSVREAAVELLGRFVLCRPQLAEQYYDMLIERILDTGISVRKRVIKILRDICIEQPTFPKITEMCVKMIRRVNDEEGIKKLVNETFQKLWFTPTPHNDKEAMTRKILNITDVVAACRDTGYDWFEQLLQNLLKSEEDSSYKPVKKACTQLVDNLVEHILKYEESLADSDNKGVNSGRLVACITTLFLFSKIRPQLMVKHAMTMQPYLTTKCSTQNDFMVICNVAKILELVVPLMEHPSETFLATIEEDLMKLIIKYGMTVVQHCVSCLGAVVNKVTQNFKFVWACFNRYYGAISKLKSQHQEDPNNTSLLTNKPALLRSLFTVGALCRHFDFDLEDFKGNSKVNIKDKVLELLMYFTKHSDEEVQTKAIIGLGFAFIQHPSLMFEQEVKNLYNNILSDKNSSVNLKIQVLKNLQTYLQEEDTRMQQADRDWKKVAKQEDLKEMGDVSSGMSSSIMQLYLKQVLEAFFHTQSSVRHFALNVIALTLNQGLIHPVQCVPYLIAMGTDPEPAMRNKADQQLVEIDKKYAGFIHMKAVAGMKMSYQVQQAINTCLKDPVRGFRQDESSSALCSHLYSMIRGNRQHRRAFLISLLNLFDDTAKTDVTMLLYIADNLACFPYQTQEEPLFIMHHIDITLSVSGSNLLQSFKESMVKDKRKERKSSPSKENESSDSEEEVSRPRKSRKRVDSDSDSDSEDDINSVMKCLPENSAPLIEFANVSQGILLLLMLKQHLKNLCGFSDSKIQKYSPSESAKVYDKAINRKTGVHFHPKQTLDFLRSDMANSKITEEVKRSIVKQYLDFKLLMEHLDPDEEEEEGEVSASTNARNKAITSLLGGGSPKNNTAAETEDDESDGEDRGGGTSGSLRRSKRNSDSTELAAQMNESVDVMDVIAICCPKYKDRPQIARVVQKTSSGFSVQWMAGSYSGSWTEAKRRDGRKLVPWVDTIKESDIIYKKIALTSANKLTNKVVQTLRSLYAAKDGTSS

SEQ ID NO: 478 - protein, 1980 aa, Homo sapiens
MNPTNPFSGQQPSAFSASSSNVGTLPSKPPFRFGQPSLFGQNSTLSGKSSGFSQVSSFPASSGVSHSSSVQTLGFTQTSSVGPFSGLEHTSTFVATSGPSSSSVLGNTGFSFKSPTSVGAFPSTSAFGQEAGEIVNSGFGKTEFSFKPLENAVFKPILGAESEPEKTQSQIASGFFTFSHPISSAPGGLAPFSFPQVTSSSATTSNFTFSKPVSSNNSLSAFTPALSNQNVEEEKRGPKSIFGSSNNSFSSFPVSSAVLGEPFQASKAGVRQGCEEAVSQVEPLPSLMKGLKRKEDQDRSPRRHGHEPAEDSDPLSRGDHPPDKRPVRLNRPRGGTLFGRTIQDVFKSNKEVGRLGNKEAKKETGFVESAESDHMAIPGGNQSVLAPSRIPGVNKEEETESREKKEDSLRGTPARQSNRSESTDSLGGLSPSEVTAIQCKNIPDYLNDRTILENHFGKIAKVQRIFTRRSKKLAVVHFFDHASAALARKKGKSLHKDMAIFWHRKKISPNKKPFSLKEKKPGDGEVSPSTEDAPFQHSPLGKAAGRTGASSLLNKSSPVKKPSLLKAHQFEGDSFDSASEGSEGLGPCVLSLSTLIGTVAETSKEKYRLLDQRDRIMRQARVKRTDLDKARTFVGTCLDMCPEKERYMRETRSQLSVFEVVPGTDQVDHAAAVKEYSRSSADQEEPLPHELRPLPVLSRTMDYLVTQIMDQKEGSLRDWYDFVWNRTRGIRKDITQQHLCDPLTVSLIEKCTRFHIHCAHFMCEEPMSSFDAKINNENMTKCLQSLKEMYQDLRNKGVFCASEAEFQGYNVLLSLNKGDILREVQQFHPAVRNSSEVKFAVQAFAALNSNNFVRFFKLVQSASYLNACLLHCYFSQIRKDALRALNFAYTVSTQRSTIFPLDGVVRMLLFRDCEEATDFLTCHGLTVSDGCVELNRSAFLEPEGLSKTRKSVFITRKLTVSVGEIVNGGPLPPVPRHTPVCSFNSQNKYIGESLAAELPVSTQRPGSDTVGGGRGEECGVEPDAPLSSLPQSLPAPAPSPVPLPPVLALTPSVAPSLFQLSVQPEPPPPEPVPMYSDEDLAQVVDELIQEALQRDCEEVGSAGAAYAAAALGVSNAAMEDLLTAATTGILRHIAAEEVSKERERREQERQRAEEERLKQERELVLSELSQGLAVELMERVMMEFVRETCSQELKNAVETDQRVRVARCCEDVCAHLVDLFLVEEIFQTAKETLQELQCFCKYLQRWREAVTARKKLRRQMRAFPAAPCCVDVSDRLRALAPSAECPIAEENLARGLLDLGHAGRLGISCTRLRRLRNKTAHQMKVQHFYQQLLSDVAWASLDLPSLVAEHLPGRQEHVFWKLVLVLPDVEEQSPESCGRILANWLKVKFMGDEGSVDDTSSDAGGIQTLSLFNSLSSKGDQMISVNVCIKVAHGALSDGAIDAVETQKDLLGASGLMLLLPPKMKSEDMAEEDVYWLSALLQLKQLLQAKPFQPALPLVVLVPSPGGDAVEKEVEDGLMLQDLVSAKLISDYTVTEIPDTINDLQGSTKVLQAVQWLVSHCPHSLDLCCQTLIQYVEDGIGHEFSGRFFHDRRERRLGGLASQEPGAIIELFNSVLQFLASVVSSEQLCDLSWPVTEFAEAGGSRLLPHLHWNAPEHLAWLKQAVLGFQLPQMDLPPLGAPWLPVCSMVVQYASQIPSSRQTQPVLQSQVENLLHRTYCRWKSKSPSPVHGAGPSVMEIPWDDLIALCINHKLRDWTPPRLPVTSEALSEDGQICVYFFKNDLKKYDVPLSWEQARLQTQKELQLREGRLAIKPFHPSANNFPIPLLHMHRNWKRSTECAQEGRIPSTEDLMRGASAEELLAQCLSSSLLLEKEENKRFEDQLQQWLSEDSGAFTDLTSLPLYLPQTLVSLSHTIEPVMKTSVTTSPQSDMMREQLQLSEATGTCLGERLKHLERLIRSSREEEVASELHLSALLDMVDI

SEQ ID NO: 479 - protein, 1447 aa, Homo sapiens
MFRAGEASKRPLPGPSPPRVRSVEVARGRAGYGFTLSGQAPCVLSCVMRGSPADFVGLRAGDQILAVNEINVKKASHEDVVKLIGKCSGVLHMVIAEGVGRFESCSSDEEGGLYEGKGWLKPKLDSKALGINRAERVVEEMQSGGIFNMIFENPSLCASNSEPLKLKQRSLSESAATRFDVGHESINNPNPNMLSKEEISKVIHDDSVFSIGLESHDDFALDASILNVAMIVGYLGSIELPSTSSNLESDSLQAIRGCMRRLRAEQKIHSLVTMKIMHDCVQLSTDKAGVVAEYPAEKLAFSAVCPDDRRFFGLVTMQTNDDGSLAQEEEGALRTSCHVFMVDPDLFNHKIHQGIARRFGFECTADPDTNGCLEFPASSLPVLQFISVLYRDMGELIEGMRARAFLDGDADAHQNNSTSSNSDSGIGNFHQEEKSNRVLVVDLGGSSSRHGPGGSAWDGVGGRGAQPWGAPWTGPFCPDPEGSPPFEAAHQTDRFWDLNKHLGPASPVEVPPASLRSSVPPSKRGTVGAGCGFNQRWLPVHVLREWQCGHTSDQDSYTDSTDGWSSINCGTLPPPMSKIPADRYRVEGSFAQPPLNAPKREWSRKAFGMQSIFGPHRNVRKTKEDKKGSKFGRGTGLTQPSQRTSARRSFGRSKRFSITRSLDDLESATVSDGELTGADLKDCVSNNSLSSNASLPSVQSCRRLRERRVASWAVSFERLLQDPVGVRYFSDFLRKEFSEENILFWQACEYFNHVPAHDKKELSYRAREIFSKFLCSKATTPVNIDSQAQLADDVLRAPHPDMFKEQQLQIFNLMKFDSYTRFLKSPLYQECILAEVEGRALPDSQQVPSSPASKHSLGSDHSSVSTPKKLSGKSKSGRSLNEELGDEDSEKKRKGAFFSWSRTRSTGRSQKKREHGDHADDALHANGGLCRRESQGSVSSAGSLDLSEACRTLAPEKDKATKHCCIHLPDGTSCVVAVKAGFSIKDILSGLCERHGINGAAADLFLVGGDKPLVLHQDSSILESRDLRLEKRTLFRLDLVPINRSVGLKAKPTKPVTEVLRPVVARYGLDLSGLLVRLSGEKEPLDLGAPISSLDGQRVVLEEKDPSRGKASADKQKGVPVKQNTAVNSSSRNHSATGEERTLGKSNSIKIKGENGKNARDPRLSKREESIAKIGKKKYQKINLDEAEEFFELISKAQSNRADDQRGLLRKEDLVLPEFLRLPPGSTELTLPTPAAVAKGFSKRSATGNGRESASQPGEQWEPVQESSDSPSTSPGSASSPPGPPGTTPPGQKSPSGPFCTPQSPVSLAQEGTAQIWKRQSQEVEAGGIQTVEDEHVAELTLMGEGDISSPNSTLLPPPSTPQEVPGPSRPGSGTHGSRDLPVNRIIDVDLVTGSAPGRDGGIAGAQAGPGRSQASGGPPTSDLPGLGPVPGEPAKPKTSAHHATFV

SEQ ID NO: 480 - protein, 2015 aa, Homo sapiens
MAGMSQRPPSMYWCVGPEESAVCPERAMETLNGAGDTGGKPSTRGGDPAARSRRTEGIRAAYRRGDRGGARDLLEEACDQCASQLEKGQLLSIPAAYGDLEMVRYLLSKRLVELPTEPTDDNPAVVAAYFGHTAVVQELLESLPGPCSPQRLLNWMLALACQRGHLGVVKLLVLTHGADPESYAVRKNEFPVIVRLPLYAAIKSGNEDIAIFLLRHGAYFCSYILLDSPDPSKHLLRKYFIEASPLPSSYPGKTALRVKWSHLRLPWVDLDWLIDISCQITELDLSANCLATLPSVIPWGLINLRKLNLSDNHLGELPGVQSSDEIICSRLLEIDISSNKLSHLPPGFLHLSKLQKLTASKNCLEKLFEEENATNWIGLRKLQELDISDNKLTELPALFLHSFKSLNSLNVSRNNLKVFPDPWACPLKCCKASRNALECLPDKMAVFWKNHLKDVDFSENALKEVPLGLFQLDALMFLRLQGNQLAALPPQEKWTCRQLKTLDLSRNQLGKNEDGLKTKRIAFFTTRGRQRSGTEAASVLEFPAFLSESLEVLCLNDNHLDTVPPSVCLLKSLSELYLGNNPGLRELPPELGQLGNLWQLDTEDLTISNVPAEIQKEGPKAMLSYLRAQLRKAEKCKLMKMIIVGPPRQGKSTLLEILQTGRAPQVVHGEATIRTTKWELQRPAGSRAKVESVEFNVWDIGGPASMATVNQCFFTDKALYVVVWNLALGEEAVANLQFWLLNIEAKAPNAVVLVVGTHLDLIEAKFRVERIATLRAYVLALCRSPSGSRATGFPDITFKHLHEISCKSLEGQEGLRQLIFHVTCSMKDVGSTIGCQRLAGRLIPRSYLSLQEAVLAEQQRRSRDDDVQYLTDRQLEQLVEQTPDNDIKDYEDLQSAISFLIETGTLLHFPDTSHGLRNLYFLDPIWLSECLQRIFNIKGSRSVAKNGVIRAEDLRMLLVGTGFTQQTEEQYFQFLAKFEIALPVANDSYLLPHLLPSKPGLDTHGMRHPTANTIQRVFKMSFVPVGFWQRFIARMLISLAEMDLQLFENKKNTKSRNRKVTIYSFTGNQRNRCSTFRVKRNQTIYWQEGLLVTFDGGYLSVESSDVNWKKKKSGGMKIVCQSEVRDFSAMAFITDHVNSLIDQWFPALTATESDGTPLMEQYVPCPVCETAWAQHTDPSEKSEDVQYFDMEDCVLTAIERDFISCPRHPDLPVPLQELVPELFMTDFPARLFLENSKLEHSEDEGSVLGQGGSGTVIYRARYQGQPVAVKRFHIKKFKNFANVPADTMLRHLRATDAMKNFSEFRQEASMLHALQHPCIVALIGISIHPLCFALELAPLSSLNTVLSENARDSSFIPLGHMLTQKIAYQIASGLAYLHKKNIIFCDLKSDNILVWSLDVKEHINIKLSDYGISRQSFHEGALGVEGTPGYQAPEIRPRIVYDEKVDMFSYGMVLYELLSGQRPALGHHQLQIAKKLSKGIRPVLGQPEEVQFRRLQALMMECWDTKPEKRPLALSVVSQMKDPTFATFMYELCCGKQTAFFSSQGQEYTVVFWDGKEESRNYTVVNTEKGLMEVQRMCCPGMKVSCQLQVQRSLWTATEDQKIYIYTLKGMCPLNTPQQALDTPAVVTCFLAVPVIKKNSYLVLAGLADGLVAVFPVVRGTPKDSCSYLCSHTANRSKFSIADEDARQNPYPVKAMEVVNSGSEVWYSNGPGLLVIDCASLEICRRLEPYMAPSMVTSVVCSSEGRGEEVVWCLDDKANSLVMYHSTTYQLCARYFCGVPSPLRDMFPVRPLDTEPPAASHTANPKVPEGDSIADVSIMYSEELGTQILIHQESLTDYCSMSSYSSSPPRQAARSPSSLPSSPASSSSVPFSTDCEDSDMLHTPGAASDRSEHDLTPMDGETFSQHLQAVKILAVRDLIWVPRRGGDVIVIGLEKDSGAQRGRVIAVLKARELTPHGVLVDAAVVAKDTVVCTFENENTEWCLAVWRGWGAREFDIFYQSYEELGRLEACTRKRR

SEQ ID NO: 481 - protein, 2699 aa, Homo sapiens
MDVKERRPYCSLTKSRREKERRYTNSSADNEECRVPTQKSYSSSETLKAFDHDSSRLLYGNRVKDLVHREADEFTRQGQNFTLRQLGVCEPATRRGLAFCAEMGLPHRGYSISAGSDADTENEAVMSPEHAMRLWGRGVKSGRSSCLSSRSNSALTLTDTEHENKSDSENEQPASNQGQSTLQPLPPSHKQHSAQHHPSITSLNRNSLTNRRNQSPAPPAALPAELQTTPESVQLQDSWVLGSNVPLESRHFLFKTGTGTTPLFSTATPGYTMASGSVYSPPTRPLPRNTLSRSAFKFKKSSKYCSWKCTALCAVGVSVLLAILLSYFIAMHLFGLNWQLQQTENDTFENGKVNSDTMPTNTVSLPSGDNGKLGGFTQENNTIDSGELDIGRRAIQEIPPGIFWRSQLFIDQPQFLKFNISLQKDALIGVYGRKGLPPSHTQYDFVELLDGSRLIAREQRSLLETERAGRQARSVSLHEAGFIQYLDSGIWHLAFYNDGKNAEQVSFNTIVIESVVECPRNCHGNGECVSGTCHCFPGFLGPDCSRAACPVLCSGNGQYSKGRCLCFSGWKGTECDVPTTQCIDPQCGGRGICIMGSCACNSGYKGESCEEADCIDPGCSNHGVCIHGECHCSPGWGGSNCEILKTMCPDQCSGHGTYLQESGSCTCDPNWTGPDCSNEICSVDCGSHGVCMGGTCRCEEGWTGPACNQRACHPRCAEHGTCKDGKCECSQGWNGEHCTIEGCPGLCNSNGRCTLDQNGWHCVCQPGWRGAGCDVAMETLCTDSKDNEGDGLIDCMDPDCCLQSSCQNQPYCRGLPDPQDIISQSLQSPSQQAAKSFYDRISFLIGSDSTHVIPGESPFNKSLASVIRGQVLTADGTPLIGVNVSFFHYPEYGYTITRQDGMFDLVANGGASLTLVFERSPFLTQYHTVWIPWNVFYVMDTLVMKKEENDIPSCDLSGFVRPNPIIVSSPLSTFFRSSPEDSPIIPETQVLHEETTIPGTDLKLSYLSSRAAGYKSVLKITMTQSIIPFNLMKVHLMVAVVGRLFQKWFPASPNLAYTFIWDKTDAYNQKVYGLSEAVVSVGYEYESCLDLTLWEKRTAILQGYELDASNMGGWTLDKHHVLDVQNGILYKGNGENQFISQQPPVVSSIMGNGRRRSISCPSCNGQADGNKLLAPVALACGIDGSLYVGDFNYVRRIFPSGNVTSVLELSSNPAHRYYLATDPVTGDLYVSDTNTRRIYRPKSLTGAKDLTKNAEVVAGTGEQCLPFDEARCGDGGKAVEATLMSPKGMAVDKNGLIYFVDGTMIRKVDQNGIISTLLGSNDLTSARPLTCDTSMHISQVRLEWPTDLAINPMDNSIYVLDNNVVLQITENRQVRIAAGRPMHCQVPGVEYPVGKHAVQTTLESATAIAVSYSGVLYITETDEKKINRIRQVTTDGEISLVAGIPSECDCKNDANCDCYQSGDGYAKDAKLSAPSSLAASPDGTLYIADLGNIRIRAVSKNKPLLNSMNFYEVASPTDQELYIFDINGTHQYTVSLVTGDYLYNFSYSNDNDITAVTDSNGNTLRIRRDPNRMPVRVVSPDNQVIWLTIGTNGCLKSMTAQGLELVLFTYHGNSGLLATKSDETGWTTFFDYDSEGRLTNVTFPTGVVTNLHGDMDKAITVDIESSSREEDVSITSNLSSIDSFYTMVQDQLRNSYQIGYDGSLRIIYASGLDSHYQTEPHVLAGTANPTVAKRNMTLPGENGQNLVEWRFRKEQAQGKVNVFGRKLRVNGRNLLSVDFDRTTKTEKIYDDHRKFLLRIAYDTSGHPTLWLPSSKLMAVNVTYSSTGQIASIQRGTTSEKVDYDGQGRIVSRVFADGKTWSYTYLEKSMVLLLHSQRQYIFEYDMWDRLSAITMPSVARHTMQTIRSIGYYRNIYNPPESNASIITDYNEEGLLLQTAFLGTSRRVLFKYRRQTRLSEILYDSTRVSFTYDETAGVLKTVNLQSDGFICTIRYRQIGPLIDRQIFRFSEDGMVNARFDYSYDNSFRVTSMQGVINETPLPIDLYQFDDISGKVEQFGKFGVIYYDINQIISTAVMTYTKHFDAHGRIKEIQYEIFRSLMYWITIQYDNMGRVTKREIKIGPFANTTKYAYEYDVDGQLQTVYLNEKIMWRYNYDLNGNLHLLNPSNSARLTPLRYDLRDRITRLGDVQYRLDEDGFLRQRGTEIFEYSSKGLLTRVYSKGSGWTVIYRYDGLGRRVSSKTSLGQHLQFFYADLTYPTRITHVYNHSSSEITSLYYDLQGHLFAMEISSGDEFYIASDNTGTPLAVFSSNGLMLKQIQYTAYGEIYFDSNIDFQLVIGFHGGLYDPLTKLIHFGERDYDILAGRWTTPDIEIWKRIGKDPAPFNLYMFRNNNPASKIHDVKDYITDVNSWLVTFGFHLHNAIPGFPVPKFDLTEPSYELVKSQQWDDIPPIFGVQQQVARQAKAFLSLGKMAEVQVSRRRAGGAQSWLWFATVKSLIGKGVMLAVSQGRVQTNVLNIANEDCIKVAAVLNNAFYLENLHFTIEGKDTHYFIKTTTPESDLGTLRLTSGRKALENGINVTVSQSTTVVNGRTRRFADVEMQFGALALHVRYGMTLDEEKARILEQARQRALARAWAREQQRVRDGEEGARLWTEGEKRQLLSAGKVQGYDGYYVLSVEQYPELADSANNIQFLRQSEIGRR

SEQ ID NO: 482 - protein, 2230 aa, Homo sapiens
MFKKLKQKISEEQQQLQQALAPAQASSNSSTPTRMRSRTSSFTEQLDEGTPNRESGDTQSFAQKLQLRVPSVESLFRSPIKESLFRSSSKESLVRTSSRESLNRLDLDSSTASFDPPSDMDSEAEDLVGNSDSLNKEQLIQRLRRMERSLSSYRGKYSELVTAYQMLQREKKKLQGILSQSQDKSLRRIAELREELQMDQQAKKHLQEEFDASLEEKDQYISVLQTQVSLLKQRLRNGPMNVDVLKPLPQLEPQAEVFTKEENPESDGEPVVEDGTSVKTLETLQQRVKRQENLLKRCKETIQSHKEQCTLLTSEKEALQEQLDERLQELEKIKDLHMAEKTKLITQLRDAKNLIEQLEQDKGMVIAETKRQMHETLEMKEEEIAQLRSRIKQMTTQGEELREQKEKSERAAFEELEKALSTAQKTEEARRKLKAEMDEQIKTIEKTSEEERISLQQELSRVKQEVVDVMKKSSEEQIAKLQKLHEKELARKEQELTKKLQTREREFQEQMKVALEKSQSEYLKISQEKEQQESLALEELELQKKAILTESENKLRDLQQEAETYRTRILELESSLEKSLQENKNQSKDLAVHLEAEKNKHNKEITVMVEKHKTELESLKHQQDALWTEKLQVLKQQYQTEMEKLREKCEQEKETLLKDKEIIFQAHIEEMNEKTLEKLDVKQTELESLSSELSEVLKARHKLEEELSVLKDQTDKMKQELEAKMDEQKNHHQQQVDSIIKEHEVSIQRTEKALKDQINQLELLLKERDKHLKEHQAHVENLEADIKRSEGELQQASAKLDVFQSYQSATHEQTKAYEEQLAQLQQKLLDLETERILLTKQVAEVEAQKKDVCTELDAHKIQVQDLMQQLEKQNSEMEQKVKSLTQVYESKLEDGNKEQEQTKQILVEKENMILQMREGQKKEIEILTQKLSAKEDSIHILNEEYETKFKNQEKKMEKVKQKAKEMQETLKKKLLDQEAKLKKELENTALELSQKEKQFNAKMLEMAQANSAGISDAVSRLETNQKEQIESLTEVHRRELNDVISIWEKKLNQQAEELQEIHEIQLQEKEQEVAELKQKILLFGCEKEEMNKEITWLKEEGVKQDTTLNELQEQLKQKSAHVNSLAQDETKLKAHLEKLEVDLNKSLKENTFLQEQLVELKMLAEEDKRKVSELTSKLKTTDEEFQSLKSSHEKSNKSLEDKSLEFKKLSEELAIQLDICCKKTEALLEAKTNELINISSSKTNAILSRISHCQHRTTKVKEALLIKTCTVSELEAQLRQLTEEQNTLNISFQQATHQLEEKENQIKSMKADIESLVTEKEALQKEGGNQQQAASEKESCITQLKKELSENINAVTLMKEELKEKKVEISSLSKQLTDLNVQLQNSISLSEKEAAISSLRKQYDEEKCELLDQVQDLSFKVDTLSKEKISALEQVDDWSNKFSEWKKKAQSRFTQHQNTVKELQIQLELKSKEAYEKDEQINLLKEELDQQNKRFDCLKGEMEDDKSKMEKKESNLETELKSQTARIMELEDHITQKTIEIESLNEVLKNYNQQKDIEHKELVQKLQHFQELGEEKDNRVKEAEEKILTLENQVYSMKAELETKKKELEHVNLSVKSKEEELKALEDRLESESAAKLAELKRKAEQKIAAIKKQLLSQMEEKEEQYKKGTESHLSELNTKLQEREREVHILEEKLKSVESSQSETLIVPRSAKNVAAYTEQEEADSQGCVQKTYEEKISVLQRNLTEKEKLLQRVGQEKEETVSSHFEMRCQYQERLIKLEHAEAKQHEDQSMIGHLQEELEEKNKKYSLIVAQHVEKEGGKNNIQAKQNLENVFDDVQKTLQEKELTCQILEQKIKELDSCLVRQKEVHRVEMEELTSKYEKLQALQQMDGRNKPTELLEENTEEKSKSHLVQPKLLSNMEAQHNDLEFKLAGAEREKQKLGKEIVRLQKDLRMLRKEHQQELEILKKEYDQEREEKIKQEQEDLELKHNSTLKQLMREFNTQLAQKEQELEMTIKETINKAQEVEAELLESHQEETNQLLKKIAEKDDDLKRTAKRYEEILDAREEEMTAKVRDLQTQLEELQKKYQQKLEQEENPGNDNVTIMELQTQLAQKTTLISDSKLKEQEFREQIHNLEDRLKKYEKNVYATTVGTPYKGGNLYHTDVSLFGEPTEFEYLRKVLFEYMMGRETKTMAKVITTVLKFPDDQTQKILEREDARLMFTSPRSGIF

SEQ ID NO: 483 - protein, 1469 aa, Homo sapiens
MDVDAEREKITQEIKELERILDPGSSGSHVEISESSLESDSEADSLPSEDLDPADPPISEEERWGEASNDEDDPKDKTLPEDPETCLQLNMVYQEVIQEKLAEANLLLAQNREQQEELMRDLAGSKGTKVKDGKSLPPSTYMGHFMKPYFKDKVTGVGPPANEDTREKAAQGIKAFEELLVTKWKNWEKALLRKSVVSDRLQRLLQPKLLKLEYLHQKQSKVSSELERQALEKQGREAEKEIQDINQLPEEALLGNRLDSHDWEKISNINFEGSRSAEEIRKFWQNSEHPSINKQEWSREEEERLQAIAAAHGHLEWQKIAEELGTSRSAFQCLQKFQQHNKALKRKEWTEEEDRMLTQLVQEMRVGSHIPYRRIVYYMEGRDSMQLIYRWTKSLDPGLKKGYWAPEEDAKLLQAVAKYGEQDWFKIREEVPGRSDAQCRDRYLRRLHFSLKKGRWNLKEEEQLIELIEKYGVGHWAKIASELPHRSGSQCLSKWKIMMGKKQGLRRRRRRARHSVRWSSTSSSGSSSGSSGGSSSSSSSSSEEDEPEQAQAGEGDRALLSPQYMVPDMDLWVPARQSTSQPWRGGAGAWLGGPAASLSPPKGSSASQGGSKEASTTAAAPGEETSPVQVPARAHGPVPRSAQASHSADTRPAGAEKQALEGGRRLLTVPVETVLRVLRANTAARSCTQKEQLRQPPLPTSSPGVSSGDSVARSHVQWLRHRATQSGQRRWRHALHRRLLNRRLLLAVTPWVGDVVVPCTQASQRPAVVQTQADGLREQLQQARLASTPVFTLFTQLFHIDTAGCLEVVRERKALPPRLPQAGARDPPVHLLQASSSAQSTPGHLFPNVPAQEASKSASHKGSRRLASSRVERTLPQASLLASTGPRPKPKTVSELLQEKRLQEARAREATRGPVVLPSQLLVSSSVILQPPLPHTPHGRPAPGPTVLNVPLSGPGAPAAAKPGTSGSWQEAGTSAKDKRLSTMQALPLAPVFSEAEGTAPAASQAPALGPGQISVSCPESGLGQSQAPAASRKQGLPEAPPFLPAAPSPTPLPVQPLSLTHIGGPHVATSVPLPVTWVLTAQGLLPVPVPAVVSLPRPAGTPGPAGLLATLLPPLTETRAAQGPRAPALSSSWQPPANMNREPEPSCRTDTPAPPTHALSQSPAEADGSVAFVPGEAQVAREIPEPRTSSHADPPEAEPPWSGRLPAFGGVIPATEPRGTPGSPSGTQEPRGPLGLEKLPLRQPGPEKGALDLEKPPLPQPGPEKGALDLGLLSQEGEAATQQWLGGQRGVRVPLLGSRLPYQPPALCSLRALSGLLLHKKALEHKATSLVVGGEAERPAGALQASLGLVRGQLQDNPAYLLLRARFLAAFTLPALLATLAPQGVRTTLSVPSRVGSESEDEDLLSELELADRDGQPGCTTATCPIQGAPDSGKCSASSCLDTSNDPDDLDVLRTRHARHTRKRRRLV

SEQ ID NO: 484 - protein, 1515 aa, Homo sapiens
MEPRSMEYFCAQVQQKDVGGRLQVGQELLLYLGAPGAISDLEEDLGRLGKTVDALTGWVGSSNYRVSLMGLEILSAFVDRLSTRFKSYVAMVIVALIDRMGDAKDKVRDEAQTLILKLMDQVAPPMYIWEQLASGFKHKNFRSREGVCLCLIETLNIFGAQPLVISKLIPHLCILFGDSNSQVRDAAILAIVEIYRHVGEKVRMDLYKRGIPPARLEMIFAKFDEVQSSGGMILSVCKDKSFDDEESVDGNRPSSAASAFKVPAPKTSGNPANSARKPGSAGGPKVGAGASKEGGAGAVDEDDFIKAFTDVPSIQIYSSRELEETLNKIREILSDDKHDWDQRANALKKIRSLLVAGAAQYDCFFQHLRLLDGALKLSAKDLRSQVVREACITVAHLSTVLGNKFDHGAEAIVPTLFNLVPNSAKVMATSGCAAIRFIIRHTHVPRLIPLITSNCTSKSVPVRRRSFEFLDLLLQEWQTHSLERHAAVLVETIKKGIHDADAEARVEARKTYMGLRNHFPGEAETLYNSLEPSYQKSLQTYLKSSGSVASLPQSDRSSSSSQESLNRPFSSKWSTANPSTVAGRVSAGSSKASSLPGSLQRSRSDIDVNAAAGAKAHHAAGQSVRSGRLGAGALNAGSYASLEDTSDKLDGTASEDGRVRAKLSAPLAGMGNAKADSRGRSRTKMVSQSQPGSRSGSPGRVLTTTALSTVSSGVQRVLVNSASAQKRSKIPRSQGCSREASPSRLSVARSSRIPRPSVSQGCSREASRESSRDTSPVRSFQPLGPGYGISQSSRLSSSVSAMRVLNTGSDVEEAVADALLLGDIRTKKKPARRRYESYGMHSDDDANSDASSACSERSYSSRNGSIPTYMRQTEDVAEVLNRCASSNWSERKEGLLGLQNLLKNQRTLSRVELKRLCEIFTRMFADPHGKRVFSMFLETLVDFIQVHKDDLQDWLFVLLTQLLKKMGADLLGSVQAKVQKALDVTRESFPNDLQFNILMRFTVDQTQTPSLKVKVAILKYIETLAKQMDPGDFINSSETRLAVSRVITWTTEPKSSDVRKAAQSVLISLFELNTPEFTMLLGALPKTFQDGATKLLHNHLRNTGNGTQSSMGSPLTRPTPRSPANWSSPLTSPTNTSQNTLSPSAFDYDTENMNSEDIYSSLRGVTEAIQNFSFRSQEDMNEPLKRDSKKDDGDSMCGGPGMSDPRAGGDATDSSQTALDNKASLLHSMPTHSSPRSRDYNPYNYSDSISPFNKSALKEAMFDDDADQFPDDLSLDHSDLVAELLKELSNHNERVEERKIALYELMKLTQEESFSVWDEHFKTILLLLLETLGDKEPTIRALALKVLREILRHQPARFKNYAELTVMKTLEAHKDPHKEVVRSAEEAASVLATSISPEQCIKVLCPIIQTADYPINLAAIKMQTKVIERVSKETLNLLLPEIMPGLIQGYDNSESSVRKACVFCLVAVHAVIGDELKPHLSQLTGSKMKLLNLYIKRAQTGSGGADPTTDVSGQS

SEQ ID NO: 485 - protein, 2363 aa, Homo sapiens
MPVLGVASKLRQPAVGSKPVHTALPIPNLGTTGSQHCSSRPLELTETESSMLSCQLALKSTCEFGEKKPLQGKAKEKEDSKIYTDWANHYLAKSGHKRLIKDLQQDIADGVLLAEIIQIIANEKVEDINGCPRSQSQMIENVDVCLSFLAARGVNVQGLSAEEIRNGNLKAILGLFFSLSRYKQQQHHQQQYYQSLVELQQRVTHASPPSEASQAKTQQDMQSSLAARYATQSNHSGIATSQKKPTRLPGPSRVPAAGSSSKVQGASNLNRRSQSFNSIDKNKPPNYANGNEKDSSKGPQSSSGVNGNVQPPSTAGQPPASAIPSPSASKPWRSKSMNVKHSATSTMLTVKQSSTATSPTPSSDRLKPPVSEGVKTAPSGQKSMLEKFKLVNARTALRPPQPPSSGPSDGGKDDDAFSESGEMEGFNSGLNSGGSTNSSPKVSPKLAPPKAGSKNLSNKKSLLQPKEKEEKNRDKNKVCTEKPVKEEKDQVTEMAPKKTSKIASLIPKGSKTTAAKKESLIPSSSGIPKPGSKVPTVKQTISPGSTASKESEKFRTTKGSPSQSLSKPITMEKASASSCPAPLEGREAGQASPSGSCTMTVAQSSGQSTGNGAVQLPQQQQHSHPNTATVAPFIYRAHSENEGTALPSADSCTSPTKMDLSYSKTAKQCLEEISGEDPETRRMRTVKNIADLRQNLEETMSSLRGTQISHSTLETTFDSTVTTEVNGRTIPNLTSRPTPMTWRLGQACPRLQAGDAPSLGAGYPRSGTSRFIHTDPSRFMYTTPLRRAAVSRLGNMSQIDMSEKASSDLDMSSEVDVGGYMSDGDILGKSLRTDDINSGYMTDGGLNLYTRSLNRIPDTATSRDIIQRGVHDVTVDADSWDDSSSVSSGLSDTLDNISTDDLNTTSSVSSYSNITVPSRKNTQLRTDSEKRSTTDETWDSPEELKKPEEDFDSHGDAGGKWKTVSSGLPEDPEKAGQKASLSVSQTGSWRRGMSAQGGAPSRQKAGTSALKTPGKTDDAKASEKGKAPLKGSSLQRSPSDAGKSSGDEGKKPPSGIGRSTATSSFGFKKPSGVGSSAMITSSGATITSGSATLGKIPKSAAIGGKSNAGRKTSLDGSQNQDDVVLHVSSKTTLQYRSLPRPSKSSTSGIPGRGGHRSSTSSIDSNVSSKSAGATTSKLREPTKIGSGRSSPVTVNQTDKEKEKVAVSDSESVSLSGSPKSSPTSASACGAQGLRQPGSKYPDIASPTFRRLFGAKAGGKSASAPNTEGVKSSSVMPSPSTTLARQGSLESPSSGTGSMGSAGGLSGSSSPLFNKPSDLTTDVISLSHSLASSPASVHSFTSGGLVWAANMSSSSAGSKDTPSYQSMTSLHTSSESIDLPLSHHGSLSGLTTGTHEVQSLLMRTGSVRSTLSESMQLDRNTLPKKGLRYTPSSRQANQEEGKEWLRSHSTGGLQDTGNQSPLVSPSAMSSSAAGKYHFSNLVSPTNLSQFNLPGPSMMRSNSIPAQDSSFDLYDDSQLCGSATSLEERPRAISHSGSFRDSMEEVHGSSLSLVSSTSSLYSTAEEKAHSEQIHKLRRELVASQEKVATLTSQLSANAHLVAAFEKSLGNMTGRLQSLTMTAEQKESELIELRETIEMLKAQNSAAQAAIQGALNGPDHPPKDLRIRRQHSSESVSSINSATSHSSIGSGNDADSKKKKKKNWVNSRGSELRSSFKQAFGKKKSTKPPSSHSDIEELTDSSLPASPKLPHNAGDCGSASMKPSQSASAICECTEAEAEIILQLKSELREKELKLTDIRLEALSSAHHLDQIREAMNRMQNEIEILKAENDRLKAETGNTAKPTRPPSESSSSTSSSSSRQSLGLSLNNLNITEAVSSDILLDDAGDATGHKDGRSVKIIVSISKGYGRAKDQKSQAYLIGSIGVSGKTKWDVLDGVIRRLFKEYVFRIDTSTSLGLSSDCIASYCIGDLIRSHNLEVPELLPCGYLVGDNNIITVNLKGVEENSLDSFVFDTLIPKPITQRYFNLLMEHHRIILSGPSGTGKTYLANKLAEYVITKSGRKKTEDAIATFNVDHKSSKELQQYLANLAEQCSADNNGVELPVVIILDNLHHVGSLSDIFNGFLNCKYNKCPYIIGTMNQGVSSSPNLELHHNFRWVLCANHTEPVKGFLGRYLRRKLIEIEIERNIRNNDLVKIIDWIPKTWHHLNSFLETHSSSDVTIGPRLFLPCPMDVEGSRVWFMDLWNYSLVPYILEAVREGLQMYGKRTPWEDPSKWVLDTYPWSSATLPQESPALLQLRPEDVGYESCTSTKEATTSKHIPQTDTEGDPLMNMLMKLQEAANYSSTQSCDSESTSHHEDILDSSLESTL

SEQ ID NO: 486 - protein, 2215 aa, Homo sapiens
MEAEFYMVILTCLIFRNSEGFQIVHVQKQQCLFKNEKVVVGSCNRTIQNQQWMWTEDEKLLHVKSALCLAISNSSRGPSRSAILDRCSQAPRWTCYDQEGFLEVENASLFLQKQGSRVVVKKARKYLHSWMKIDVNKEGKLVNESLCLQKAGLGAEVSVRSTRNTAPPQILTTFNAVPDGLVFLIRNTTEAFIRNAAENYSQNSSERQHPNLHMTGITDTSWVLSTTQPFSSTTEETGLAEPERCNFTLAESKASSHSVSIQWRILGSPCNFSLIYSSDTLGAALCPTFRIDNTTYGCNLQDLQAGTIYNFRIISLDEERTVVLQTDPLPPARFGVSKEKTTSTSLHVWWTPSSGKVTSYEVQLFDENNQKIQGVQIQESTSWNEYTFFNLTAGSKYNIAITAVSGGKRSFSVYTNGSTVPSPVKDIGISTKANSLLISWSHGSGNVERYRLMLMDKGILVHGGVVDKHATSYAFHGLTPGYLYNLTVMTEAAGLQNYRWKLVRTAPMEVSNLKVTNDGSLTSLKVKWQRPPGNVDSYNITLSHKGTIKESRVLAPWITETHFKELVPGRLYQVTVSCVSGELSAQKMAVGRTFPDKVANLEANNNGRMRSLVVSWSPPAGDWEQYRILLFNDSVVLLNITVGKEETQYVMDDTGLVPGRQYEVEVIVESGNLKNSERCQGRTVPLAVLQLRVKHANETSLSIMWQTPVAEWEKYIISLADRDLLLIHKSLSKDAKEFTFTDLVPGRKYMATVTSISGDLKNSSSVKGRTVPAQVTDLHVANQGMTSSLFTNWTQAQGDVEFYQVLLIHENVVIKNESISSETSRYSFHSLKSGSLYSVVVTTVSGGISSRQVVVEGRTVPSSVSGVTVNNSGRNDYLSVSWLLAPGDVDNYEVTLSHDGKVVQSLVIAKSVRECSFSSLTPGRLYTVTITTRSGKYENHSFSQERTVPDKVQGVSVSNSARSDYLRVSWVHATGDFDHYEVTIKNKNNFIQTKSIPKSENECVFVQLVPGRLYSVTVTTKSGQYEANEQGNGRTIPEPVKDLTLRNRSTEDLHVTWSGANGDVDQYEIQLLFNDMKVFPPFHLVNTATEYRFTSLTPGRQYKILVLTISGDVQQSAFIEGFTVPSAVKNIHISPNGATDSLTVNWTPGGGDVDSYTVSAFRHSQKVDSQTIPKHVFEHTFHRLEAGEQYQIMIASVSGSLKNQINVVGRTVPASVQGVIADNAYSSYSLIVSWQKAAGVAERYDILLLTENGILLRNTSEPATTKQHKFEDLTPGKKYKIQILTVSGGLFSKEAQTEGRTVPAAVTDLRITENSTRHLSFRWTASEGELSWYNIFLYNPDGNLQERAQVDPLVQSFSFQNLLQGRMYKMVIVTHSGELSNESFIFGRTVPASVSHLRGSNRNTTDSLWFNWSPASGDFDFYELILYNPNGTKKENWKDKDLTEWRFQGLVPGRKYVLWVVTHSGDLSNKVTAESRTAPSPPSLMSFADIANTSLAITWKGPPDWTDYNDFELQWLPRDALTVFNPYNNRKSEGRIVYGLRPGRSYQFNVKTVSGDSWKTYSKPIFGSVRTKPDKIQNLHCRPQNSTAIACSWIPPDSDFDGYSIECRKMDTQEVEFSRKLEKEKSLLNIMMLVPHKRYLVSIKVQSAGMTSEVVEDSTITMIDRPPPPPPHIRVNEKDVLISKSSINFTVNCSWFSDTNGAVKYFTVVVREADGSDELKPEQQHPLPSYLEYRHNASIRVYQTNYFASKCAENPNSNSKSFNIKLGAEMESLGGKCDPTQQKFCDGPLKPHTAYRISIRAFTQLFDEDLKEFTKPLYSDTFFSLPITTESEPLFGAIEGVSAGLFLIGMLVAVVALLICRQKVSHGRERPSARLSIRRDRPLSVHLNLGQKGNRKTSCPIKINQFEGHFMKLQADSNYLLSKEYEELKDVGRNQSCDIALLPENRGKNRYNNILPYDATRVKLSNVDDDPCSDYINASYIPGNNFRREYIVTQGPLPGTKDDFWKMVWEQNVHNIVMVTQCVEKGRVKCDHYWPADQDSLYYGDLILQMLSESVLPEWTIREFKICGEEQLDAHRLIRHFHYTVWPDHGVPETTQSLIQFVRTVRDYINRSPGAGPTVVHCSAGVGRTGTFIALDRILQQLDSKDSVDIYGAVHDLRLHRVHMVQTECQYVYLHQCVRDVLRARKLRSEQENPLFPIYENVNPEYHRDPVYSRH

SEQ ID NO: 487 - protein, 2190 aa, Homo sapiens
MNRAKPTTVRRPSAAAKPSGHPPPGDFIALGSKGQANESKTASTLLKPAPSGLPSERKRDAAAALSSASALTGLTKRPKLSSTPPLSALGRLAEAAVAEKRAISPSIKEPSVVPIEVLPTVLLDEIEAAELEGNDDRIEGVLCGAVKQLKVTRAKPDSTLYLSLMYLAKIKPNIFATEGVIEALCSLLRRDASINFKAKGNSLVSVLACNLLMAAYEEDENWPEIFVKVYIEDSLGERIWVDSPHCKTFVDNIQTAFNTRMPPRSVLLQGEAGRVAGDLGAGSSPHPSLTEEEDSQTELLIAEEKLSPEQEGQLMPRYEELAESVEEYVLDMLRDQLNRRQPIDNVSRNLLRLLTSTCGYKEVRLLAVQKLEMWLQNPKLTRPAQDLLMSVCMNCNTHGSEDMDVISHLIKIRLKPKVLLNHFMLCIRELLSAHKDNLGTTIKLVIFNELSSARNPNNMQVLYTALQHSSELAPKFLAMVFQDLLTNKDDYLRASRALLREIIKQTKHEINFQAFCLGLMQERKEPQYLEMEFKERFVVHITDVLAVSMMLGITAQVKEAGIAWDKGEKRNLEVLRSFQNQIAAIQRDAVWWLHTVVPSISKLAPKDYVHCLHKVLFTEQPETYYKWDNWPPESDRNFFLRLCSEVPILEDTLMRILVIGLSRELPLGPADAMELADHLVKRAAAVQADDVEVLKVGRTQLIDAVLNLCTYHHPENIQLPPGYQPPNLAISTLYWKAWPLLLVVAAFNPENIGLAAWEEYPTLKMLMEMVMTNNYSYPPCTLTDEETRTEMLNRELQTAQREKQEILAFEGHLAAASTKQTITESSSLLLSQLTSLDPQGPPRRPPPHILDQVKSLNQSLRLGHLLCRSRNPDFLLHIIQRQASSQSMPWLADLVQSSEGSLDVLPVQCLCEFLLHDAVDDAASGEEDDEGESKEQKAKKRQRQQKQRQLLGRLQDLLLGPKADEQTTCEVLDYFLRRLGSSQVASRVLAMKGLSLVLSEGSLRDGEEKEPPMEEDVGDTDVLQGYQWLLRDLPRLPLFDSVRSTTALALQQAIHMETDPQTISAYLIYLSQHTPVEEQAQHSDLALDVARLVVERSTIMSHLFSKLSPSAASDAVLSALLSIFSRYVRRMRQSKEGEEVYSWSESQDQVFLRWSSGETATMHILVVHAMVILLTLGPPRADDSEFQALLDIWFPEEKPLPTAFLVDTSEEALLLPDWLKLRMIRSEVLRLVDAALQDLEPQQLLLFVQSFGIPVSSMSKLLQFLDQAVAHDPQTLEQNIMDKNYMAHLVEVQHERGASGGQTFHSLLTASLPPRRDSTEAPKPKSSPEQPIGQGRIRVGTQLRVLGPEDDLAGMFLQIFPLSPDPRWQSSSPRPVALALQQALGQELARVVQGSPEVPGITVRVLQALATLLSSPHGGALVMSMHRSHFLACPLLRQLCQYQRCVPQDTGFSSLFLKVLLQMLQWLDSPGVEGGPLRAQLRMLASQASAGRRLSDVRGGLLRLAEALAFRQDLEVVSSTVRAVIATLRSGEQCSVEPDLISKVLQGLIEVRSPHLEELLTAFFSATADAASPFPACKPVVVVSSLLLQEEEPLAGGKPGADGGSLEAVRLGPSSGLLVDWLEMLDPEVVSSCPDLQLRLLFSRRKGKGQAQVPSFRPYLLTLFTHQSSWPTLHQCIRVLLGKSREQRFDPSASLDFLWACIHVPRIWQGRDQRTPQKRREELVLRVQGPELISLVELILAEAETRSQDGDTAACSLIQARLPLLLSCCCGDDESVRKVTEHLSGCIQQWGDSVLGRRCRDLLLQLYLQRPELRVPVPEVLLHSEGAASSSVCKLDGLIHRFITLLADTSDSRALENRGADASMACRKLAVAHPLLLLRHLPMIAALLHGRTHLNFQEFRQQNHLSCFLHVLGLLELLQPHVFRSEHQGALWDCLLSFIRLLLNYRKSSRHLAAFINKFVQFIHKYITYNAPAAISFLQKHADPLHDLSFDNSDLVMLKSLLAGLSLPSRDDRTDRGLDEEGEEESSAGSLPLVSVSLFTPLTAAEMAPYMKRLSRGQTVEDLLEVLSDIDEMSRRRPEILSFFSTNLQRLMSSAEECCRNLAFSLALRSMQNSPSIAAAFLPTFMYCLGSQDFEVVQTALRNLPEYALLCQEHAAVLLHRAFLVGMYGQMDPSAQISEALRILHMEAVM

SEQ ID NO: 488 - protein, 1670 aa, Homo sapiens
MSARTAPRPQVLLLPLLLVLLAAAPAASKGCVCKDKGQCFCDGAKGEKGEKGFPGPPGSPGQKGFTGPEGLPGPQGPKGFPGLPGLTGSKGVRGISGLPGFSGSPGLPGTPGNTGPYGLVGVPGCSGSKGEQGFPGLPGTLGYPGIPGAAGLKGQKGAPAKEEDIELDAKGDPGLPGAPGPQGLPGPPGFPGPVGPPGPPGFFGFPGAMGPRGPKGHMGERVIGHKGERGVKGLTGPPGPPGTVIVTLTGPDNRTDLKGEKGDKGAMGEPGPPGPSGLPGESYGSEKGAPGDPGLQGKPGKDGVPGFPGSEGVKGNRGFPGLMGEDGIKGQKGDIGPPGFRGPTEYYDTYQEKGDEGTPGPPGPRGARGPQGPSGPPGVPGSPGSSRPGLRGAPGWPGLKGSKGERGRPGKDAMGTPGSPGCAGSPGLPGSPGPPGPPGDIVFRKGPPGDHGLPGYLGSPGIPGVDGPKGEPGLLCTQCPYIPGPPGLPGLPGLHGVKGIPGRQGAAGLKGSPGSPGNTGLPGFPGFPGAQGDPGLKGEKGETLQPEGQVGVPGDPGLRGQPGRKGLDGIPGTPGVKGLPGPKGELALSGEKGDQGPPGDPGSPGSPGPAGPAGPPGYGPQGEPGLQGTQGVPGAPGPPGEAGPRGELSVSTPVPGPPGPPGPPGHPGPQGPPGIPGSLGKCGDPGLPGPDGEPGIPGIGFPGPPGPKGDQGFPGTKGSLGCPGKMGEPGLPGKPGLPGAKGEPAVAMPGGPGTPGFPGERGNSGEHGEIGLPGLPGLPGTPGNEGLDGPRGDPGQPGPPGEQGPPGRCIEGPRGAQGLPGLNGLKGQQGRRGKTGPKGDPGIPGLDRSGFPGETGSPGIPGHQGEMGPLGQRGYPGNPGILGPPGEDGVIGMMGFPGAIGPPGPPGNPGTPGQRGSPGIPGVKGQRGTPGAKGEQGDKGNPGPSEISHVIGDKGEPGLKGFAGNPGEKGNRGVPGMPGLKGLKGLPGPAGPPGPRGDLGSTGNPGEPGLRGIPGSMGNMGMPGSKGKRGTLGFPGRAGRPGLPGIHGLQGDKGEPGYSEGTRPGPPGPTGDPGLPGDMGKKGEMGQPGPPGHLGPAGPEGAPGSPGSPGLPGKPGPHGDLGFKGIKGLLGPPGIRGPPGLPGFPGSPGPMGIRGDQGRDGIPGPAGEKGETGLLRAPPGPRGNPGAQGAKGDRGAPGFPGLPGRKGAMGDAGPRGPTGIEGFPGPPGLPGAIIPGQTGNRGPPGSRGSPGAPGPPGPPGSHVIGIKGDKGSMGHPGPKGPPGTAGDMGPPGRLGAPGTPGLPGPRGDPGFQGFPGVKGEKGNPGFLGSIGPPGPIGPKGPPGVRGDPGTLKIISLPGSPGPPGTPGEPGMQGEPGPPGPPGNLGPCGPRGKPGKDGKPGTPGPAGEKGNKGSKGEPGPAGSDGLPGLKGKRGDSGSPATWTTRGFVFTRHSQTTAIPSCPEGTVPLYSGFSFLFVQGNQRAHGQDLGTLGSCLQRFTTMPFLFCNVNDVCNFASRNDYSYWLSTPALMPMNMAPITGRALEPYISRCTVCEGPAIAIAVHSQTTDIPPCPHGWISLWKGFSFIMFTSAGSEGTGQALASPGSCLEEFRASPFLECHGRGTCNYYSNSYSFWLASLNPERMFRKPIPSTVKAGELEKIISRCQVCMKKRH

SEQ ID NO: 489 - protein, 2225 aa, Homo sapiens
MAALVLEDGSVLRGQPFGAAVSTAGEVVFQTGMVGYPEALTDPSYKAQILVLTYPLIGNYGIPPDEMDEFGLCKWFESSGIHVAALVVGECCPTPSHWSATRTLHEWLQQHGIPGLQGVDTRELTKKLREQGSLLGKLVQNGTEPSSLPFLDPNARPLVPEVSIKTPRVFNTGGAPRILALDCGLKYNQIRCLCQRGAEVTVVPWDHALDSQEYEGLFLSNGPGDPASYPSVVSTLSRVLSEPNPRPVFGICLGHQLLALAIGAKTYKMRYGNRGHNQPCLLVGSGRCFLTSQNHGFAVETDSLPADWAPLFTNANDGSNEGIVHNSLPFFSVQFHPEHQAGPSDMELLFDIFLETVKEATAGNPGGQTVRERLTERLCPPGIPTPGSGLPPPRKVLILGSGGLSIGQAGEFDYSGSQAIKALKEENIQTLLINPNIATVQTSQGLADKVYFLPITPHYVTQVIRNERPDGVLLTFGGQTALNCGVELTKAGVLARYGVRVLGTPVETIELTEDRRAFAARMAEIGEHVAPSEAANSLEQAQAAAERLGYPVLVRAAFALGGLGSGFASNREELSALVAPAFAHTSQVLVDKSLKGWKEIEYEVVRDAYGNCVTVCNMENLDPLGIHTGESIVVAPSQTLNDREYQLLRQTAIKVTQHLGIVGECNVQYALNPESEQYYIIEVNARLSRSSALASKATGYPLAYVAAKLALGIPLPELRNSVTGGTAAFEPSVDYCVVKIPRWDLSKFLRVSTKIGSCMKSVGEVMGIGRSFEEAFQKALRMVDENCVGFDHTVKPVSDMELETPTDKRIFVVAAALWAGYSVDRLYELTRIDRWFLHRMKRIIAHAQLLEQHRGQPLPPDLLQQAKCLGFSDKQIALAVLSTELAVRKLRQELGICPAVKQIDTVAAEWPAQTNYLYLTYWGTTHDLTFRTPHVLVLGSGVYRIGSSVEFDWCAVGCIQQLRKMGYKTIMVNYNPETVSTDYDMCDRLYFDEISFEVVMDIYELENPEGVILSMGGQLPNNMAMALHRQQCRVLGTSPEAIDSAENRFKFSRLLDTIGISQPQWRELSDLESARQFCQTVGYPCVVRPSYVLSGAAMNVAYTDGDLERFLSSAAAVSKEHPVVISKFIQEAKEIDVDAVASDGVVAAIAISEHVENAGVHSGDATLVTPPQDITAKTLERIKAIVHAVGQELQVTGPFNLQLIAKDDQLKVIECNVRVSRSFPFVSKTLGVDLVALATRVIMGEEVEPVGLMTGSGVVGVKVPQFSFSRLAGADVVLGVEMTSTGEVAGFGESRCEAYLKAMLSTGFKIPKKNILLTIGSYKNKSELLPTVRLLESLGYSLYASLGTADFYTEHGVKVTAVDWHFEEAVDGECPPQRSILEQLAEKNFELVINLSMRGAGGRRLSSFVTKGYRTRRLAADFSVPLIIDIKCTKLFVEALGQIGPAPPLKVHVDCMTSQKLVRLPGLIDVHVHLREPGGTHKEDFASGTAAALAGGITMVCAMPNTRPPIIDAPALALAQKLAEAGARCDFALFLGASSENAGTLGTVAGSAAGLKLYLNETFSELRLDSVVQWMEHFETWPSHLPIVAHAEQQTVAAVLMVAQLTQRSVHICHVARKEEILLIKAAKARGLPVTCEVAPHHLFLSHDDLERLGPGKGEVRPELGSRQDVEALWENMAVIDCFASDHAPHTLEEKCGSRPPPGFPGLETMLPLLLTAVSEGRLSLDDLLQRLHHNPRRIFHLPPQEDTYVEVDLEHEWTIPSHMPFSKAHWTPFEGQKVKGTVRRVVLRGEVAYIDGQVLVPPGYGQDVRKWPQGAVPQLPPSAPATSEMTTTPERPRRGIPGLPDGRFHLPPRIHRASDPGLPAEEPKEKSSRKVAEPELMGTPDGTCYPPPPVPRQASPQNLGTPGLLHPQTSPLLHSLVGQHILSVQQFTKDQMSHLFNVAHTLRMMVQKERSLDILKGKVMASMFYEVSTRTSSSFAAAMARLGGAVLSFSEATSSVQKGESLADSVQTMSCYADVVVLRHPQPGAVELAAKHCRRPVINAGDGVGEHPTQALLDIFTIREELGTVNGMTITMVGDLKHGRTVHSLACLLTQYRVSLRYVAPPSLRMPPTVRAFVASRGTKQEEFESIEEALPDTDVLYMTRIQKERFGSTQEYEACFGQFILTPHIMTRAKKKMVVMHPMPRVNEISVEVDSDPRAAYFRQAENGMYIRMALLATVLGRF

SEQ ID NO: 490 - protein, 2210 aa, Homo sapiens
MTAAANWVANGASLEDCHSNLFSLAELTGIKWRRYNFGGHGDCGPIISAPAQDDPILLSFIRCLQANLLCVWRRDVKPDCKELWIFWWGDEPNLVGVIHHELQVVEEGLWENGLSYECRTLLFKAIHNLLERCLMDKNFVRIGKWFVRPYEKDEKPVNKSEHLSCAFTFFLHGESNVCTSVEIAQHQPIYLINEEHIHMAQSSPAPFQVLVSPYGLNGTLTGQAYKMSDPATRKLIEEWQYFYPMVLKKKEESKEEDELGYDDDFPVAVEVIVGGVRMVYPSAFVLISQNDIPVPQSVASAGGHIAVGQQGLGSVKDPSNCGMPLTPPTSPEQAILGESGGMQSAASHLVSQDGGMITMHSPKRSGKIPPKLHNHMVHRVWKECILNRTQSKRSQMSTPTLEEEPASNPATWDFVDPTQRVSCSCSRHKLLKRCAVGPNRPPTVSQPGFSAGPSSSSSLPPPASSKHKTAERQEKGDKLQKRPLIPFHHRPSVAEELCMEQDTPGQKLGLAGIDSSLEVSSSRKYDKQMAVPSRNTSKQMNLNPMDSPHSPISPLPPTLSPQPRGQETESLDPPSVPVNPALYGNGLELQQLSTLDDRTVLVGQRLPLMAEVSETALYCGIRPSNPESSEKWWHSYRLPPSDDAEFRPPELQGERCDAKMEVNSESTALQRLLAQPNKRFKIWQDKQPQLQPLHFLDPLPLSQQPGDSLGEVNDPYTFEDGDIKYIFTANKKCKQGTEKDSLKKNKSEDGFGTKDVTTPGHSTPVPDGKNAMSIFSSATKTDVRQDNAAGRAGSSSLTQVTDLAPSLHDLDNIFDNSDDDELGAVSPALRSSKMPAVGTEDRPLGKDGRAAVPYPPTVADLQRMFPTPPSLEQHPAFSPVMNYKDGISSETVTALGMMESPMVSMVSTQLTEFKMEVEDGLGSPKPEEIKDFSYVHKVPSFQPFVGSSMFAPLKMLPSHCLLPLKIPDACLFRPSWAIPPKIEQLPMPPAATFIRDGYNNVPSVGSLADPDYLNTPQMNTPVTLNSAAPASNSGAGVLPSPATPRFSVPTPRTPRTPRTPRGGGTASGQGSVKYDSTDQGSPASTPSTTRPLNSVEPATMQPIPEAHSLYVTLILSDSVMNIFKDRNFDSCCICACNMNIKGADVGLYIPDSSNEDQYRCTCGFSAIMNRKLGYNSGLFLEDELDIFGKNSDIGQAAERRLMMCQSTFLPQVEGTKKPQEPPISLLLLLQNQHTQPFASLNFLDYISSNNRQTLPCVSWSYDRVQADNNDYWTECFNALEQGRQYVDNPTGGKVDEALVRSATVHSWPHSNVLDISMLSSQDVVRMLLSLQPFLQDAIQKKRTGRTWENIQHVQGPLTWQQFHKMAGRGTYGSEESPEPLPIPTLLVGYDKDFLTISPFSLPFWERLLLDPYGGHRDVAYIVVCPENEALLEGAKTFFRDLSAVYEMCRLGQHKPICKVLRDGIMRVGKTVAQKLTDELVSEWFNQPWSGEENDNHSRLKLYAQVCRHHLAPYLATLQLDSSLLIPPKYQTPPAAAQGQATPGNAGPLAPNGSAAPPAGSAFNPTSNSSSTNPAASSSASGSSVPPVSSSASAPGISQISTTSSSGFSGSVGGQNPSTGGISADRTQGNIGCGGDTDPGQSSSQPSQDGQESVTERERIGIPTEPDSADSHAHPPAVVIYMVDPFTYAAEEDSTSGNFWLLSLMRCYTEMLDNLPEHMRNSFILQIVPCQYMLQTMKDEQVFYIQYLKSMAFSVYCQCRRPLPTQIHIKSLTGFGPAASIEMTLKNPERPSPIQLYSPPFILAPIKDKQTELGETFGEASQKYNVLFVGYCLSHDQRWLLASCTDLHGELLETCVVNIALPNRSRRSKVSARKIGLQKLWEWCIGIVQMTSLPWRVVIGRLGRLGHGELKDWSILLGECSLQTISKKLKDVCRMCGISAADSPSILSACLVAMEPQGSFVVMPDAVTMGSVFGRSTALNMQSSQLNTPQDASCTHILVFPTSSTIQVAPANYPNEDGFSPNNDDMFVDLPFPDDMDNDIGILMTGNLHSSPNSSPVPSPGSPSGIGVGSHFQHSRSQGERLLSREAPEELKQQPLALGYFVSTAKAENLPQWFWSSCPQAQNQCPLFLKASLHHHISVAQTDELLPARNSQRVPHPLDSKTTSDVLRFVLEQYNALSWLTCNPATQDRTSCLPVHFVVLTQLYNAIMNIL

SEQ ID NO: 491 - protein, 3546 aa, Homo sapiens
MCENCADLVEVLNEISDVEGGDGLQLRKEHTLKIFTYINSWTQRQCLCCFKEYKHLEIFNQVVCALINLVIAQVQVLRDQLCKHCTTINIDSTWQDESNQAEEPLNIDRECNEGSTERQKSIEKKSNSTRICNLTEEESSKSSDPFSLWSTDEKEKLLLCVAKIFQIQFPLYTAYKHNTHPTIEDISTQESNILGAFCDMNDVEVPLHLLRYVCLFCGKNGLSLMKDCFEYGTPETLPFLIAHAFITVVSNIRIWLHIPAVMQHIIPFRTYVIRYLCKLSDQELRQSAARNMADLMWSTVKEPLDTTLCFDKESLDLAFKYFMSPTLTMRLAGLSQITNQLHTFNDVCNNESLVSDTETSIAKELADWLISNNVVEHIFGPNLHIEIIKQCQVILNFLAAEGRLSTQHIDCIWAAAQLKHCSRYIHDLFPSLIKNLDPVPLRHLLNLVSALEPSVHTEQTLYLASMLIKALWNNALAAKAQLSKQSSFASLLNTNIPIGNKKEEEELRRTAPSPWSPAASPQSSDNSDTHQSGGSDIEMDEQLINRTKHVQQRLSDTEESMQGSSDETANSGEDGSSGPGSSSGHSDGSSNEVNSSHASQSAGSPGSEVQSEDIADIEALKEEDEDDDHGHNPPKSSCGTDLRNRKLESQAGICLGDSQGMSERNGTSSGTGKDLVFNTESLPSVDNRMRMLDACSHSEDPEHDISGEMNATHIAQGSQESCITRTGDFLGETIGNELFNCRQFIGPQHHHHHHHHHHHHDGHMVDDMLSADDVSCSSSQVSAKSEKNMADFDGEESGCEEELVQINSHAELTSHLQQHLPNLASIYHEHLSQGPVVHKHQFNSNAVTDINLDNVCKKGNTLLWDIVQDEDAVNLSEGLINEAEKLLCSLVCWFTDRQIRMRFIEGCLENLGNNRSVVISLRLLPKLFGTFQQFGSSYDTHWITMWAEKELNMMKLFFDNLVYYIQTVREGRQKHALYSHSAEVQVRLQFLTCVFSTLGSPDHFRLSLEQVDILWHCLVEDSECYDDALHWFLNQVRSKDQHAMGMETYKHLFLEKMPQLKPETISMTGLNLFQHLCNLARLATSAYDGCSNSELCGMDQFWGIALRAQSGDVSRAAIQYINSYYINGKTGLEKEQEFISKCMESLMIASSSLEQESHSSLMVIERGLLMLKTHLEAFRRRFAYHLRQWQIEGTGISSHLKALSDKQSLPLRVVCQPAGLPDKMTIEMYPSDQVADLRAEVTHWYENLQKEQINQQAQLQEFGQSNRKGEFPGGLMGPVRMISSGHELTTDYDEKALHELGFKDMQMVFVSLGAPRRERKGEGVQLPASCLPPPQKDNIPMLLLLQEPHLTTLFDLLEMLASFKPPSGKVAVDDSESLRCEELHLHAENLSRRVWELLMLLPTCPNMLMAFQNISDEQSNDGFNWKELLKIKSAHKLLYALEIIEALGKPNRRIRRESTGSYSDLYPDSDDSSEDQVENSKNSWSCKFVAAGGLQQLLEIFNSGILEPKEQESWTVWQLDCLACLLKLICQFAVDPSDLDLAYHDVFAWSGIAESHRKRTWPGKSRKAAGDHAKGLHIPRLTEVFLVLVQGTSLIQRLMSVAYTYDNLAPRVLKAQSDHRSRHEVSHYSMWLLVSWAHCCSLVKSSLADSDHLQDWLKKLTLLIPETAVRHESCSGLYKLSLSGLDGGDSINRSFLLLAASTLLKFLPDAQALKPIRIDDYEEEPILKPGCKEYFWLLCKLVDNIHIKDASQTTLLDLDALARHLADCIRSREILDHQDGNVEDDGLTGLLRLATSVVKHKPPFKFSREGQEFLRDIFNLLFLLPSLKDRQQPKCKSHSSRAAAYDLLVEMVKGSVENYRLIHNWVMAQHMQSHAPYKWDYWPHEDVRAECRFVGLTNLGATCYLASTIQQLYMIPEARQAVFTAKYSEDMKHKTTLLELQKMFTYLMESECKAYNPRPFCKTYTMDKQPLNTGEQKDMTEFFTDLITKIEEMSPELKNTVKSLFGGVITNNVVSLDCEHVSQTAEEFYTVRCQVADMKNIYESLDEVTIKDTLEGDNMYTCSHCGKKVRAEKRACFKKLPRILSFNTMRYTFNMVTMMKEKVNTHFSFPLRLDMTPYTEDFLMGKSERKEGFKEVSDHSKDSESYEYDLIGVTVHTGTADGGHYYSFIRDIVNPHAYKNNKWYLFNDAEVKPFDSAQLASECFGGEMTTKTYDSVTDKFMDFSFEKTHSAYMLFYKRMEPEEENGREYKFDVSSELLEWIWHDNMQFLQDKNIFEHTYFGFMWQLCSCIPSTLPDPKAVSLMTAKLSTSFVLETFIHSKEKPTMLQWIELLTKQFNNSQAACEWFLDRMADDDWWPMQILIKCPNQIVRQMFQRLCIHVIQRLRPVHAHLYLQPGMEDGSDDMDTSVEDIGGRSCVTRFVRTLLLIMEHGVKPHSKHLTEYFAFLYEFAKMGEEESQFLLSLQAISTMVHFYMGTKGPENPQVEVLSEEEGEEEEEEEDILSLAEEKYRPAALEKMIALVALLVEQSRSERHLTLSQTDMAALTGGKGFPFLFQHIRDGINIRQTCNLIFSLCRYNNRLAEHIVSMLFTSIAKLTPEAANPFFKLLTMLMEFAGGPPGMPPFASYILQRIWEVIEYNPSQCLDWLAVQTPRNKLAHSWVLQNMENWVERFLLAHNYPRVRTSAAYLLVSLIPSNSFRQMFRSTRSLHIPTRDLPLSPDTTVVLHQVYNVLLGLLSRAKLYVDAAVHGTTKLVPYFSFMTYCLISKTEKLMFSTYFMDLWNLFQPKLSEPAIATNHNKQALLSFWYNVCADCPENIRLIVQNPVVTKNIAFNYILADHDDQDVVLFNRGMLPAYYGILRLCCEQSPAFTRQLASHQNIQWAFKNLTPHASQYPGAVEELFNLMQLFIAQRPDMREEELEDIKQFKKTTISCYLRCLDGRSCWTTLISAFRILLESDEDRLLVVFNRGLILMTESFNTLHMMYHEATACHVTGDLVELLSIFLSVLKSTRPYLQRKDVKQALIQWQERIEFAHKLLTLLNSYSPPELRNACIDVLKELVLLSPHDFLHTLVPFLQHNHCTYHHSNIPMSLGPYFPCRENIKLIGGKSNIRPPRPELNMCLLPTMVETSKGKDDVYDRMLLDYFFSYHQFIHLLCRVAINCEKFTETLVKLSVLVAYEGLPLHLALFPKLWTELCQTQSAMSKNCIKLLCEDPVFAEYIKCILMDERTFLNNNIVYTFMTHFLLKVQSQVFSEANCANLISTLITNLISQYQNLQSDFSNRVEISKASASLNGDLRALALLLSVHTPKQLNPALIPTLQELLSKCRTCLQQRNSLQEQEAKERKTKDDEGATPIKRRRVSSDEEHTVDSCISDMKTETREVLTPTSTSDNETRDSSIIDPGTEQDLPSPENSSVKEYRMEVPSSFSEDMSNIRSQHAEEQSNNGRYDDCKEFKDLHCSKDSTLAEEESEFPSTSISAVLSDLADLRSCDGQALPSQDPEVALSLSCGHSRGLFSHMQQHDILDTLCRTIESTIHVVTRISGKGNQAAS

SEQ ID NO: 492 - protein, 2261 aa, Homo sapiens
MACWPQLRLLLWKNLTFRRRQTCQLLLEVAWPLFIFLILISVRLSYPPYEQHECHFPNKAMPSAGTLPWVQGIICNANNPCFRYPTPGEAPGVVGNFNKSIVARLFSDARRLLLYSQKDTSMKDMRKVLRTLQQIKKSSSNLKLQDFLVDNETFSGFLYHNLSLPKSTVDKMLRADVILHKVFLQGYQLHLTSLCNGSKSEEMIQLGDQEVSELCGLPREKLAAAERVLRSNMDILKPILRTLNSTSPFPSKELAEATKTLLHSLGTLAQELFSMRSWSDMRQEVMFLTNVNSSSSSTQIYQAVSRIVCGHPEGGGLKIKSLNWYEDNNYKALFGGNGTEEDAETFYDNSTTPYCNDLMKNLESSPLSRIIWKALKPLLVGKILYTPDTPATRQVMAEVNKTFQELAVFHDLEGMWEELSPKIWTFMENSQEMDLVRMLLDSRDNDHFWEQQLDGLDWTAQDIVAFLAKHPEDVQSSNGSVYTWREAFNETNQAIRTISRFMECVNLNKLEPIATEVWLINKSMELLDERKFWAGIVFTGITPGSIELPHHVKYKIRMDIDNVERTNKIKDGYWDPGPRADPFEDMRYVWGGFAYLQDVVEQAIIRVLTGTEKKTGVYMQQMPYPCYVDDIFLRVMSRSMPLFMTLAWIYSVAVIIKGIVYEKEARLKETMRIMGLDNSILWFSWFISSLIPLLVSAGLLVVILKLGNLLPYSDPSVVFVFLSVFAVVTILQCFLISTLFSRANLAAACGGIIYFTLYLPYVLCVAWQDYVGFTLKIFASLLSPVAFGFGCEYFALFEEQGIGVQWDNLFESPVEEDGFNLTTSVSMMLFDTFLYGVMTWYIEAVFPGQYGIPRPWYFPCTKSYWFGEESDEKSHPGSNQKRISEICMEEEPTHLKLGVSIQNLVKVYRDGMKVAVDGLALNFYEGQITSFLGHNGAGKTTTMSILTGLFPPTSGTAYILGKDIRSEMSTIRQNLGVCPQHNVLFDMLTVEEHIWFYARLKGLSEKHVKAEMEQMALDVGLPSSKLKSKTSQLSGGMQRKLSVALAFVGGSKVVILDEPTAGVDPYSRRGIWELLLKYRQGRTIILSTHHMDEADVLGDRIAIISHGKLCCVGSSLFLKNQLGTGYYLTLVKKDVESSLSSCRNSSSTVSYLKKEDSVSQSSSDAGLGSDHESDTLTIDVSAISNLIRKHVSEARLVEDIGHELTYVLPYEAAKEGAFVELFHEIDDRLSDLGISSYGISETTLEEIFLKVAEESGVDAETSDGTLPARRNRRAFGDKQSCLRPFTEDDAADPNDSDIDPESRETDLLSGMDGKGSYQVKGWKLTQQQFVALLWKRLLIARRSRKGFFAQIVLPAVFVCIALVFSLIVPPFGKYPSLELQPWMYNEQYTFVSNDAPEDTGTLELLNALTKDPGFGTRCMEGNPIPDTPCQAGEEEWTTAPVPQTIMDLFQNGNWTMQNPSPACQCSSDKIKKMLPVCPPGAGGLPPPQRKQNTADILQDLTGRNISDYLVKTYVQIIAKSLKNKIWVNEFRYGGFSLGVSNTQALPPSQEVNDAIKQMKKHLKLAKDSSADRFLNSLGRFMTGLDTKNNVKVWFNNKGWHAISSFLNVINNAILRANLQKGENPSHYGITAFNHPLNLTKQQLSEVALMTTSVDVLVSICVIFAMSFVPASFVVFLIQERVSKAKHLQFISGVKPVIYWLSNFVWDMCNYVVPATLVIIIFICFQQKSYVSSTNLPVLALLLLLYGWSITPLMYPASFVFKIPSTAYVVLTSVNLFIGINGSVATFVLELFTDNKLNNINDILKSVFLIFPHFCLGRGLIDMVKNQAMADALERFGENRFVSPLSWDLVGRNLFAMAVEGVVFFLITVLIQYRFFIRPRPVNAKLSPLNDEDEDVRRERQRILDGGGQNDILEIKELTKIYRRKRKPAVDRICVGIPPGECFGLLGVNGAGKSSTFKMLTGDTTVTRGDAFLNKNSILSNIHEVHQNMGYCPQFDAITELLTGREHVEFFALLRGVPEKEVGKVGEWAIRKLGLVKYGEKYAGNYSGGNKRKLSTAMALIGGPPVVFLDEPTTGMDPKARRFLWNCALSVVKEGRSVVLTSHSMEECEALCTRMAIMVNGRFRCLGSVQHLKNRFGDGYTIVVRIAGSNPDLKPVQDFFGLAFPGSVLKEKHRNMLQYQLPSSLSSLARIFSILSQSKKRLHIEDYSVSQTTLDQVFVNFAKDQSDDDHLKDLSLHKNQTVVDVAVLTSFLQDEKVKESYV

SEQ ID NO: 493 - protein, 2694 aa, Homo sapiens
MASRERLFELWMLYCTKKDPDYLKLWLDTFVSSYEQFLDVDFEKLPTRVDDMPPGISLLPDNILQVLRIQLLQCVQKMADGLEEQQQALSILLVKFFIILCRNLSNVEEIGTCSYINYVITMTTLYIQQLKSKKKEKEMADQTCIEEFVIHALAFCESLYDPYRNWRHRISGRILSTVEKSRQKYKPASLTVEFVPFFYQCFQESEHLKESLKCCLLHLFGAIVAGGQRNALQAISPATMEVLMRVLADCDSWEDGDPEEVGRKAELTLKCLTEVVHILLSSNSDQRQVETSTILENYFKLLNSDHSALPNQRRSRQWENRFIALQIKMLNTITAMLDCTDRPVLQAIFLNSNCFEHLIRLLQNCKVFQGQLDCLAISTIQALTAVMNKSPAAKEVFKERIGYTHMLEVLKSLGQPPLELLKELMNMAVEGDHTSVGILGISNVQPLLLLIQWLPELQSHDLQIFISDWLKRICCINRQSRTTCVNANMGIRIIETLDLHSSLHQTCAENLIAIHGSLGSQSVSSEEIRRLLRLLRVDESESVHPYVTPVTRAILTMARKLSLESALQYFNLSHSMAGISVPPIQKWPGSAFSFSAWFCLDQDQLTLGIANKGGKRKQLYSFFTGSGMGFEAFITHSGMLVVAVCTKREYATVMLPDHSFCDSLWHNITVVHMPGKRPFGQSFVYIYDNGQQKVSAPLRFPAMNEPFTSCCIGSAGQRTTTPPPSQIPDPPFSSPITPHRTSFGGILSSASWGGTIEKSKLITKLISAGTQDSEWGCPTSLEGQLGSVIIFYEPLQPPQVKALYLAGPNCLSPWKCQESDMADLPGNILLYYTAKACKNSICLDLSTNCLHGRLTGNKVVNWDIKDIINCIGGLNVLFPLLEQISHFSEGQIPEEKNESTVPESVTPVEGDWLVWTSTKASESRLERNLVATFILIVKHFIQRHPINQGNLIHSHGVATLGALLQKVPSTLMDVNVLMAVQLLIEQVSLEKNMQLLQQMYQYLLFDFRIWNRGDFPFRIGHIQYLSTIIKDSRRVFRKKYGVQFLLDTLRIYYGNGCKYNELSLDDIRTIRTSLYGLIKYFLCKGGSHEEIQSIMGYIAATNEEEQLFGILDVLFSLLRTSPTRGQLFLLLFEPGNADILYALLLNQKYSDRLREIIFKIMEQMLKCTNVYERSKQHIRLREVGYSGLGLLLNEALVNTSLIKNLTHQIINTDPVINFKDLLSVVYISHRAHINVRVAICRKVLQILQFQPDAAHQISQQVGWQDTLVRLFLKAKFENGNTLHKHSRAVLMKDNDKNMSTEDTKKNSDEKTDEEKITSFASANVSSDQWSLEDRHSLDSNTPLFPEDSSVGELSFKSENQEEFWHSNPSHLSLDLSGIDSCEMSDSGSQVPDSLPSTPSPVESTKSFSVHSDRESSITNDMGFSDDFSLLESQERCEEELLQLLTHILNYVMCKGLEKSDDDTWIERGQVFSALSKPGISSELLRPSDEIKLTLLQKMLEWAISENREAKTNPVTAENAFRLVLIIQDFLQSEGLVNSNMWTEKLLEDMMLLFDCLSVCYSESPVWVKLSQIQIQLLLGFIGRGNLQVCAMASAKLNTLLQTKVIENQDEACYILGKLEHVLSQSIKEQTEIYSFLIPLVRTLVSKIYELLFMNLHLPSLPFTNGSSSFFEDFQEYCNSNEWQVYIEKYIVPYMKQYEAHTFYDGHENMALYWKDCYEALMVNMHKRDREGGESKLKFQELFVEPFNRKARQENLRYNNMLKQLSSQQLATLRRWKAIQLYLTCERGPWAKRKQNPIHWKLANVENYSRMRLKLVPNYNFKTHEEASALRDNLGIQHSQPSSDTLLLEVVKQVKVSDMVEDKLDLPEEDITARVNVDEKEEQDQKEKLVLMEDCELITIIDVIPGRLEITTQHIYFYDGSIEKEDGVGFDFKWPHSQIREIHLRRYNLRRSALEIFHVDQSNYFLNFKKEVRNKIYSRLLSLHSPNSYYGSRSPQELFKASGLTQKWVNREISNFDYLIQINTMAGRTYNDLAQYPVFPWILQDYTSEELDLNNPAVFRDLSKPIGVVNEKNAKAMREKYENFEDPMGTIDKFHYGTHYSNSAGVMHYLIRVEPFTTLHIQLQSGRFDCADRQFHSIPATWQALMDNPYDVKELIPEFFYFPEFLENQNQFNLGRLQISKELVNDVILPKWAKSAEDFIYKHRKALESEYVSAHLHEWIDLIFGYKQRGPAAVEALNVFYYCSYEGAVDLDALTDEKERKALEGMINNFGQTPCQLLKEPHPPRLSAEEAVQKPTKIDTSTLNLFQHLPELKSFFIEGISDGIPLLKATIPKNQYRSFMSQGSPELLITISMNYVIGTHGWLPYDRNISNYFTFIKDQTVTNPKTQRSINGSFAPGLEITSKLFVVSHDAKLLFSAGYWDNSIQVMSLTKGKIISHIIRHMDIVTCLATDYCGIHLISGSRDTTCMIWQITQQGGVPVGLASKPFQILYGHTNEVLSVGISTELDMAVSGSRDGTVIIHTIQKGQYMRTLRPPCESSLFLTIPNLAISWEGHIVVYSSTEEKTTLKDKNALHLFSINGKYLGSQILKEQVSDICIIGEHIVTGSIQGFLSIRDLHSLNLSINPLAMRLPIHCVCVTKEYSHILVGLEDGKLIVVGVGKPAEMRSGQLSRKFWGSSKRLSQISAGETEYNTQDSK

SEQ ID NO: 494 - protein, 2316 aa, Homo sapiens
MDGVSSEANEENDNIERPVRRRHSSILKPPRSPLQDLRGGNERVQESNALRNKKNSRRVSFADTIKVFQTESHMKIVRKSEMEETETGENLLLIQNKKLEDNYCEITGMNTLLSAPIHTQMQQKEFSIIEHTRERKHANDQTVIFSDENQMDLTSSHTVMITKGLLDNPISEKSTKIDTTSFLANLKLHTEDSRMKKEVNFSVDQNTSSENKIDFNDFIKRLKTGKCSAFPDVPDKENFEIPIYSKEPNSASSTHQMHVSLKEDENNSNITRLFREKDDGMNFTQCHTANIQTLIPTSSETNSRESKGNDITIYGNDFMDLTFNHTLQILPATGNFSEIENQTQNAMDVTTGYGTKASGNKTVFKSKQNTAFQDLSINSADKIHITRSHIMGAETHIVSQTCNQDARILAMTPESIYSNPSIQGCKTVFYSSCNDAMEMTKCLSNMREEKNLLKHDSNYAKMYCNPDAMSSLTEKTIYSGEENMDITKSHTVAIDNQIFKQDQSNVQIAAAPTPEKEMMLQNLMTTSEDGKMNVNCNSVPHVSKERIQQSLSNPLSISLTDRKTELLSGENMDLTESHTSNLGSQVPLAAYNLAPESTSESHSQSKSSSDECEEITKSRNEPFQRSDIIAKNSLTDTWNKDKDWVLKILPYLDKDSPQSADCNQEIATSHNIVYCGGVLDKQITNRNTVSWEQSLFSTTKPLFSSGQFSMKNHDTAISSHTVKSVLGQNSKLAEPLRKSLSNPTPDYCHDKMIICSEEEQNMDLTKSHTVVIGFGPSELQELGKTNLEHTTGQLTTMNRQIAVKVEKCGKSPIEKSGVLKSNCIMDVLEDESVQKPKFPKEKQNVKIWGRKSVGGPKIDKTIVFSEDDKNDMDITKSYTIEINHRPLLEKRDCHLVPLAGTSETILYTCGQDDMEITRSHTTALECKTVSPDEITTRPMDKTVVFVDNHVELEMTESHTVFIDYQEKERTDRPNFELSQRKSLGTPTVICTPTEESVFFPGNGESDRLVANDSQLTPLEEWSNNRGPVEVADNMELSKSATCKNIKDVQSPGFLNEPLSSKSQRRKSLKLKNDKTIVFSENHKNDMDITQSCMVEIDNESALEDKEDFHLAGASKTILYSCGQDDMEITRSHTTALECKTLLPNEIAIRPMDKTVLFTDNYSDLEVTDSHTVFIDCQATEKILEENPKFGIGKGKNLGVSFPKDNSCVQEIAEKQALAVGNKIVLHTEQKQQLFAATNRTTNEIIKFHSAAMDEKVIGKVVDQACTLEKAQVESCQLNNRDRRNVDFTSSHATAVCGSSDNYSCLPNVISCTDNLEGSAMLLCDKDEEKANYCPVQNDLAYANDFASEYYLESEGQPLSAPCPLLEKEEVIQTSTKGQLDCVITLHKDQDLIKDPRNLLANQTLVYSQDLGEMTKLNSKRVSFKLPKDQMKVYVDDIYVIPQPHFSTDQPPLPKKGQSSINKEEVILSKAGNKSLNIIENSSAPICENKPKILNSEEWFAAACKKELKENIQTTNYNTALDFHSNSDVTKQVIQTHVNAGEAPDPVITSNVPCFHSIKPNLNNLNGKTGEFLAFQTVHLPPLPEQLLELGNKAHNDMHIVQATEIHNINIISSNAKDSRDEENKKSHNGAETTSLPPKTVFKDKVRRCSLGIFLPRLPNKRNCSVTGIDDLEQIPADTTDINHLETQPVSSKDSGIGSVAGKLNLSPSQYINEENLPVYPDEINSSDSINIETEEKALIETYQKEISPYENKMGKTCNSQKRTWVQEEEDIHKEKKIRKNEIKFSDTTQDREIFDHHTEEDIDKSANSVLIKNLSRTPSSCSSSLDSIKADGTSLDFSTYRSSQMESQFLRDTICEESLREKLQDGRITIREFFILLQVHILIQKPRQSNLPGNFTVNTPPTPEDLMLSQYVYRPKIQIYREDCEARRQKIEELKLSASNQDKLLVDINKNLWEKMRHCSDKELKAFGIYLNKIKSCFTKMTKVFTHQGKVALYGKLVQSAQNEREKLQIKIDEMDKILKKIDNCLTEMETETKNLEDEEKNNPVEEWDSEMRAAEKELEQLKTEEEELQRNLLELEVQKEQTLAQIDFMQKQRNRTEELLDQLSLSEWDVVEWSDDQAVFTFVYDTIQLTITFEESVVGFPFLDKRYRKIVDVNFQSLLDEDQAPPSSLLVHKLIFQYVEEKESWKKTCTTQHQLPKMLEEFSLVVHHCRLLGEEIEYLKRWGPNYNLMNIDINNNELRLLFSSSAAFAKFEITLFLSAYYPSVPLPSTIQNHVGNTSQDDIATILSKVPLENNYLKNVVKQIYQDLFQDCHFYH

SEQ ID NO: 495 - protein, 3396 aa, Homo sapiens
MFINIKSILWMCSTLIVTHALHKVKVGKSPPVRGSLSGKVSLPCHFSTMPTLPPSYNTSEFLRIKWSKIEVDKNGKDLKETTVLVAQNGNIKIGQDYKGRVSVPTHPEAVGDASLTVVKLLASDAGLYRCDVMYGIEDTQDTVSLTVDGVVFHYRAATSRYTLNFEAAQKACLDVGAVIATPEQLFAAYEDGFEQCDAGWLADQTVRYPIRAPRVGCYGDKMGKAGVRTYGFRSPQETYDVYCYVDHLDGDVFHLTVPSKFTFEEAAKECENQDARLATVGELQAAWRNGFDQCDYGWLSDASVRHPVTVARAQCGGGLLGVRTLYRFENQTGFPPPDSRFDAYCFKPKEATTIDLSILAETASPSLSKEPQMVSDRTTPIIPLVDELPVIPTEFPPVGNIVSFEQKATVQPQAITDSLATKLPTPTGSTKKPWDMDDYSPSASGPLGKLDISEIKEEVLQSTTGVSHYATDSWDGVVEDKQTQESVTQIEQIEVGPLVTSMEILKHIPSKEFPVTETPLVTARMILESKTEKKMVSTVSELVTTGHYGFTLGEEDDEDRTLTVGSDESTLIFDQIPEVITVSKTSEDTIHTHLEDLESVSASTTVSPLIMPDNNGSSMDDWEERQTSGRITEEFLGKYLSTTPFPSQHRTEIELFPYSGDKILVEGISTVIYPSLQTEMTHRRERTETLIPEMRTDTYTDEIQEEITKSPFMGKTEEEVFSGMKLSTSLSEPIHVTESSVEMTKSFDFPTLITKLSAEPTEVRDMEEDFTATPGTTKYDENITTVLLAHGTLSVEAATVSKWSWDEDNTTSKPLESTEPSASSKLPPALLTTVGMNGKDKDIPSFTEDGADEFTLIPDSTQKQLEEVTDEDIAAHGKFTIRFQPTTSTGIAEKSTLRDSTTEEKVPPITSTEGQVYATMEGSALGEVEDVDLSKPVSTVPQFAHTSEVEGLAFVSYSSTQEPTTYVDSSHTIPLSVIPKTDWGVLVPSVPSEDEVLGEPSQDILVIDQTRLEATISPETMRTTKITEGTTQEEFPWKEQTAEKPVPALSSTAWTPKEAVTPLDEQEGDGSAYTVSEDELLTGSERVPVLETTPVGKIDHSVSYPPGAVTEHKVKTDEVVTLTPRIGPKVSLSPGPEQKYETEGSSTTGFTSSLSPFSTHITQLMEETTTEKTSLEDIDLGSGLFEKPKATELIEFSTIKVTVPSDITTAFSSVDRLHTTSAFKPSSAITKKPPLIDREPGEETTSDMVIIGESTSHVPPTTLEDIVAKETETDIDREYFTTSSPPATQPTRPPTVEDKEAFGPQALSTPQPPASTKFHPDINVYIIEVRENKTGRMSDLSVIGHPIDSESKEDEPCSEETDPVHDLMAEILPEFPDIIEIDLYHSEENEEEEEECANATDVTTTPSVQYINGKHLVTTVPKDPEAAEARRGQFESVAPSQNFSDSSESDTHPFVIAKTELSTAVQPNESTETTESLEVTWKPETYPETSEHFSGGEPDVFPTVPFHEEFESGTAKKGAESVTERDTEVGHQAHEHTEPVSLFPEESSGEIAIDQESQKIAFARATEVTFGEEVEKSTSVTYTPTIVPSSASAYVSEEEAVTLIGNPWPDDLLSTKESWVEATPRQVVELSGSSSIPITEGSGEAEEDEDTMFTMVTDLSQRNTTDTLITLDTSRIITESFFEVPATTIYPVSEQPSAKVVPTKFVSETDTSEWISSTTVEEKKRKEEEGTTGTASTFEVYSSTQRSDQLILPFELESPNVATSSDSGTRKSFMSLTTPTQSEREMTDSTPVFTETNTLENLGAQTTEHSSIHQPGVQEGLTTLPRSPASVFMEQGSGEAAADPETTTVSSFSLNVEYAIQAEKEVAGTLSPHVETTFSTEPTGLVLSTVMDRVVAENITQTSREIVISERLGEPNYGAEIRGFSTGFPLEEDFSGDFREYSTVSHPIAKEETVMMEGSGDAAFRDTQTSPSTVPTSVHISHISDSEGPSSTMVSTSAFPWEEFTSSAEGSGEQLVTVSSSVVPVLPSAVQKFSGTASSIIDEGLGEVGTVNEIDRRSTILPTAEVEGTKAPVEKEEVKVSGTVSTNFPQTIEPAKLWSRQEVNPVRQEIESETTSEEQIQEEKSFESPQNSPATEQTIFDSQTFTETELKTTDYSVLTTKKTYSDDKEMKEEDTSLVNMSTPDPDANGLESYTTLPEATEKSHFFLATALVTESIPAEHVVTDSPIKKEESTKHFPKGMRPTIQESDTELLFSGLGSGEEVLPTLPTESVNFTEVEQINNTLYPHTSQVESTSSDKIEDFNRMENVAKEVGPLVSQTDIFEGSGSVTSTTLIEILSDTGAEGPTVAPLPFSTDIGHPQNQTVRWAEEIQTSRPQTITEQDSNKNSSTAEINETTTSSTDFLARAYGFEMAKEFVTSAPKPSDLYYEPSGEGSGEVDIVDSFHTSATTQATRQESSTTFVSDGSLEKHPEVPSAKAVTADGFPTVSVMLPLHSEQNKSSPDPTSTLSNTVSYERSTDGSFQDRFREFEDSTLKPNRKKPTENIIIDLDKEDKDLILTITESTILEILPELTSDKNTIIDIDHTKPVYEDILGMQTDIDTEVPSEPHDSNDESNDDSTQVQEIYEAAVNLSLTEETFEGSADVLASYTQATHDESMTYEDRSQLDHMGFHFTTGIPAPSTETELDVLLPTATSLPIPRKSATVIPEIEGIKAEAKALDDMFESSTLSDGQAIADQSEIIPTLGQFERTQEEYEDKKHAGPSFQPEFSSGAEEALVDHTPYLSIATTHLMDQSVTEVPDVMEGSNPPYYTDTTLAVSTFAKLSSQTPSSPLTIYSGSEASGHTEIPQPSALPGIDVGSSVMSPQDSFKEIHVNIEATFKPSSEEYLHITEPPSLSPDTKLEPSEDDGKPELLEEMEASPTELIAVEGTEILQDFQNKTDGQVSGEAIKMFPTIKTPEAGTVITTADEIELEGATQWPHSTSASATYGVEAGVVPWLSPQTSERPTLSSSPEINPETQAALIRGQDSTIAASEQQVAARILDSNDQATVNPVEFNTEVATPPFSLLETSNETDFLIGINEESVEGTAIYLPGPDRCKMNPCLNGGTCYPTETSYVCTCVPGYSGDQCELDFDECHSNPCRNGATCVDGFNTFRCLCLPSYVGALCEQDTETCDYGWHKFQGQCYKYFAHRRTWDAAERECRLQGAHLTSILSHEEQMFVNRVGHDYQWIGLNDKMFEHDFRWTDGSTLQYENWRPNQPDSFFSAGEDCVVIIWHENGQWNDVPCNYHLTYTCKKGTVACGQPPVVENAKTFGKMKPRYEINSLIRYHCKDGFIQRHLPTIRCLGNGRWAIPKITCMNPSAYQRTYSMKYFKNSSSAKDNSINTSKHDHRWSRRWQESRR

SEQ ID NO: 496 - protein, 1801 aa, Homo sapiens
MPENPATDKLQVLQVLDRLKMKLQEKGDTSQNEKLSMFYETLKSPLFNQILTLQQSIKQLKGQLNHIPSDCSANFDFSRKGLLVFTDGSITNGNVHRPSNNSTVSGLFPWTPKLGNEDFNSVIQQMAQGRQIEYIDIERPSTGGLGFSVVALRSQNLGKVDIFVKDVQPGSVADRDQRLKENDQILAINHTPLDQNISHQQAIALLQQTTGSLRLIVAREPVHTKSSTSSSLNDTTLPETVCWGHVEEVELINDGSGLGFGIVGGKTSGVVVRTIVPGGLADRDGRLQTGDHILKIGGTNVQGMTSEQVAQVLRNCGNSVRMLVARDPAGDISVTPPAPAALPVALPTVASKGPGSDSSLFETYNVELVRKDGQSLGIRIVGYVGTSHTGEASGIYVKSIIPGSAAYHNGHIQVNDKIVAVDGVNIQGFANHDVVEVLRNAGQVVHLTLVRRKTSSSTSPLEPPSDRGTVVEPLKPPALFLTGAVETETNVDGEDEEIKERIDTLKNDNIQALEKLEKVPDSPENELKSRWENLLGPDYEVMVATLDTQIADDAELQKYSKLLPIHTLRLGVEVDSFDGHHYISSIVSGGPVDTLGLLQPEDELLEVNGMQLYGKSRREAVSFLKEVPPPFTLVCCRRLFDDEASVDEPRRTETSLPETEVDHNMDVNTEEDDDGELALWSPEVKIVELVKDCKGLGFSILDYQDPLDPTRSVIVIRSLVADGVAERSGGLLPGDRLVSVNEYCLDNTSLAEAVEILKAVPPGLVHLGICKPLVEDNEEESCYILHSSSNEDKTEFSGTIHDINSSLILEAPKGFRDEPYFKEELVDEPFLDLGKSFHSQQKEIEQSKEAWEMHEFLTPRLQEMDEEREMLVDEEYELYQDPSPSMELYPLSHIQEATPVPSVNELHFGTQWLHDNEPSESQEARTGRTVYSQEAQPYGYCPENVMKENFVMESLPSVPSTEGNSQQGRFDDLENLNSLAKTSLDLGMIPNDVQGPSLLIDLPVVAQRREQEDLPLYQHQATRVISKASAYTGMLSSRYATDTCELPEREEGEGEETPNFSHWGPPRIVEIFREPNVSLGISIVGGQTVIKRLKNGEELKGIFIKQVLEDSPAGKTNALKTGDKILEVSGVDLQNASHSEAVEAIKNAGNPVVFIVQSLSSTPRVIPNVHNKANKITGNQNQDTQEKKEKRQGTAPPPMKLPPPYKALTDDSDENEEEDAFTDQKIRQRYADLPGELHIIELEKDKNGLGLSLAGNKDRSRMSIFVVGINPEGPAAADGRMRIGDELLEINNQILYGRSHQNASAIIKTAPSKVKLVFIRNEDAVNQMAVTPFPVPSSSPSSIEDQSGTEPISSEEDGSVEVGIKQLPESESFKLAVSQMKQQKYPTKVSFSSQEIPLAPASSYHSTDADFTGYGGFQAPLSVDPATCPIVPGQEMIIEISKGRSGLGLSIVGGKDTPLNAIVIHEVYEEGAAARDGRLWAGDQILEVNGVDLRNSSHEEAITALRQTPQKVRLVVYRDEAHYRDEENLEIFPVDLQKKAGRGLGLSIVGKRNGSGVFISDIVKGGAADLDGRLIQGDQILSVNGEDMRNASQETVATILKCAQGLVQLEIGRLRAGSWTSARTTSQNSQGSQQSAHSSCHPSFAPVITGLQNLVGTKRVSDPSQKNSGTDMEPRTVEINRELSDALGISIAGGRGSPLGDIPVFIAMIQASGVAARTQKLKVGDRIVSINGQPLDGLSHADVVNLLKNAYGRIILQVVADTNISAIAAQLENMSTGYHLGSPTAEHHPEDTEEQLQMTAD

SEQ ID NO: 497 - protein, 1843 aa, Homo sapiens
MADTQTQVAPTPTMRMATAEDLPLPPPPALEDLPLPPPKESFSKFHQQRQASELRRLYRHIHPELRKNLAEAVAEDLAEVLGSEEPTEGDVQCMRWIFENWRLDAIGEHERPAAKEPVLCGDVQATSRKFEEGSFANSTDQEPTRPQPGGGDVRAARWLFETKPLDELTGQAKELEATVREPAASGDVQGTRMLFETRPLDRLGSRPSLQEQSPLELRSEIQELKGDVKKTVKLFQTEPLCAIQDAEGAIHEVKAACREEIQSNAVRSARWLFETRPLDAINQDPSQVRVIRGISLEEGARPDVSATRWIFETQPLDAIREILVDEKDFQPSPDLIPPGPDVQQQQHLFETRALDTLKGDEEAGAEAPPKEEVVPGDVRSTLWLFETKPLDAFRDKVQVGHLQRVDPQDGEGHLSSDSSSALPFSQSAPQRDELKGDVKTFKNLFETLPLDSIGQGEVLAHGSPSREEGTDSAGQAQGIGSPVYAMQDSKGRLHALTSVSREQIVGGDVQGYRWMFETQPLDQLGRSPSTIDVVRGITRQEVVAGDVGTARWLFETQPLEMIHQREQQERQKEEGKSQGDPQPEAPPKGDVQTIRWLFETCPMSELAEKQGSEVTDPTAKAEAQSCTWMFKPQPVDRPVGSREQHLQVSQVPAGERQTDRHVFETEPLQASGRPCGRRPVRYCSRVEIPSGQVSRQKEVFQALEAGKKEEQEPRVIAGSIPAGSVHKFTWLFENCPMGSLAAESIQGGNLLEEQPMSPSGNRMQESQETAAEGTLRTLHATPGILHHGGILMEARGPGELCLAKYVLSGTGQGHPYIRKEELVSGELPRIICQVLRRPDVDQQGLLVQEDPTGQLQLKPLRLPTPGSSGNIEDMDPELQQLLACGLGTSVARTGLVMQETEQGLVALTAYSLQPRLTSKASERSSVQLLASCIDKGDLSGLHSLRWEPPADPSPVPASEGAQSLHPTESIIHVPPLDPSMGMGHLRASGATPCPPQAIGKAVPLAGEAAAPAQLQNTEKQEDSHSGQKGMAVLGKSEGATTTPPGPGAPDLLAAMQSLRMATAEAQSLHQQVLNKHKQGPTPTATSNPIQDGLRKAGATQSNIRPGGGSDPRIPAAPRKVSREEQALPRGLPGGWVTIQDGIYTAHPVRTFDPPGGVQLSQREPQSRHRETALSVQAPRPLQGGPGQSTGPGREEPGGCTQMAWGPPGKAMAEVCPGGLQAAETTLKTAPLGRHILASGPQAAGASPHPHNAFVPPPPTLPAAVTGPDFPAGAHRAEDSIQQASEPLKDPLLHSHSSPAGQRTPGGSQTKTPKLDPTMPPKKKPQLPPKPAHLTQSHPPQRLPKPLPLSPSFSSEVGQREHQRGERDTAIPQPAKVPTTVDQGHIPLARCPSGHSQPSLQHGLSTTAPRPTKNQATGSNAQSSEPPKLNALNHDPTSPQWGPGPSGEQPMEGSHQGAPESPDSLQRNQKELQGLLNQVQALEKEAASSVDVQALRRLFEAVPQLGGAAPQAPAAHQKPEASVEQAFGELTRVSTEVAQLKEQTLARLLDIEEAVHKALSSMSSLQPEASARGHFQGPPKDHSAHKISVTVSSSARPSGSGQEVGGQTAVKNQAKVECHTEAQSQVKIRNHTEARGHTASTAPSTRRQETSREYLCPPRVLPSSRDSPSSPTFISIQSATRKPLETPSFKGNPDVSVKSTQLAQDIGQALLHQKGVQDKTGKKDITQCSVQPEPAPPSASPLPRGWQKSVLELQTGPGSSQHYGAMRTVTEQYEEVDQFGNTVLMSSTTVTEQAEPPRNPGSHLGLHASPLLRQFLHSPAGFSSDLTEAETVQVSCSYSQPAAQ

SEQ ID NO: 498 - protein, 2102 aa, Homo sapiens
MAAAPARGGGGGGGGGGGCSGSGSSASRGFYFNTVLSLARSLAVQRPASLEKVQKLLCMCPVDFHGIFQLDERRRDAVIALGIFLIESDLQHKDCVVPYLLRLLKGLPKVYWVEESTARKGRGALPVAESFSFCLVTLLSDVAYRDPSLRDEILEVLLQVLHVLLGMCQALEIQDKEYLCKYAIPCLIGISRAFGRYSNMEESLLSKLFPKIPPHSLRVLEELEGVRRRSFNDFRSILPSNLLTVCQEGTLKRKTSSVSSISQVSPERGMPPPSSPGGSAFHYFEASCLPDGTALEPEYYFSTISSSFSVSPLFNGVTYKEFNIPLEMLRELLNLVKKIVEEAVLKSLDAIVASVMEANPSADLYYTSFSDPLYLTMFKMLRDTLYYMKDLPTSFVKEIHDFVLEQFNTSQGELQKILHDADRIHNELSPLKLRCQANAACVDLMVWAVKDEQGAENLCIKLSEKLQSKTSSKVIIAHLPLLICCLQGLGRLCERFPVVVHSVTPSLRDFLVIPSPVLVKLYKYHSQYHTVAGNDIKISVTNEHSESTLNVMSGKKSQPSMYEQLRDIAIDNICRCLKAGLTVDPVIVEAFLASLSNRLYISQESDKDAHLIPDHTIRALGHIAVALRDTPKVMEPILQILQQKFCQPPSPLDVLIIDQLGCLVITGNQYIYQEVWNLFQQISVKASSVVYSATKDYKDHGYRHCSLAVINALANIAANIQDEHLVDELLMNLLELFVQLGLEGKRASERASEKGPALKASSSAGNLGVLIPVIAVLTRRLPPIKEAKPRLQKLFRDFWLYSVLMGFAVEGSGLWPEEWYEGVCEIATKSPLLTFPSKEPLRSVLQYNSAMKNDTVTPAELSELRSTIINLLDPPPEVSALINKLDFAMSTYLLSVYRLEYMRVLRSTDPDRFQVMFCYFEDKAIQKDKSGMMQCVIAVADKVFDAFLNMMADKAKTKENEEELERHAQFLLVNFNHIHKRIRRVADKYLSGLVDKFPHLLWSGTVLKTMLDILQTLSLSLSADIHKDQPYYDIPDAPYRITVPDTYEARESIVKDFAARCGMILQEAMKWAPTVTKSHLQEYLNKHQNWVSGLSQHTGLAMATESILHFAGYNKQNTTLGATQLSERPACVKKDYSNFMASLNLRNRYAGEVYGMIRFSGTTGQMSDLNKMMVQDLHSALDRSHPQHYTQAMFKLTAMLISSKDCDPQLLHHLCWGPLRMFNEHGMETALACWEWLLAGKDGVEVPFMREMAGAWHMTVEQKFGLFSAEIKEADPLAASEASQPKPCPPEVTPHYIWIDFLVQRFEIAKYCSSDQVEIFSSLLQRSMSLNIGGAKGSMNRHVAAIGPRFKLLTLGLSLLHADVVPNATIRNVLREKIYSTAFDYFSCPPKFPTQGEKRLREDISIMIKFWTAMFSDKKYLTASQLVPPDNQDTRSNLDITVGSRQQATQGWINTYPLSSGMSTISKKSGMSKKTNRGSQLHKYYMKRRTLLLSLLATEIERLITWYNPLSAPELELDQAGENSVANWRSKYISLSEKQWKDNVNLAWSISPYLAVQLPARFKNTEAIGNEVTRLVRLDPGAVSDVPEAIKFLVTWHTIDADAPELSHVLCWAPTDPPTGLSYFSSMYPPHPLTAQYGVKVLRSFPPDAILFYIPQIVQALRYDKMGYVREYILWAASKSQLLAHQFIWNMKTNIYLDEEGHQKDPDIGDLLDQLVEEITGSLSGPAKDFYQREFDFFNKITNVSAIIKPYPKGDERKKACLSALSEVKVQPGCYLPSNPEAIVLDIDYKSGTPMQSAAKAPYLAKFKVKRCGVSELEKEGLRCRSDSEDECSTQEADGQKISWQAAIFKVGDDCRQDMLALQIIDLFKNIFQLVGLDLFVFPYRVVATAPGCGVIECIPDCTSRDQLGRQTDFGMYDYFTRQYGDESTLAFQQARYNFIRSMAAYSLLLFLLQIKDRHNGNIMLDKKGHIIHIDFGFMFESSPGGNLGWEPDIKLTDEMVMIMGGKMEATPFKWFMEMCVRGYLAVRPYMDAVVSLVTLMLDTGLPCFRGQTIKLLKHRFSPNMTEREAANFIMKVIQSCFLSNRSRTYDMIQYYQNDIPY

SEQ ID NO: 499 - protein, 1812 aa, Homo sapiens
MDRVGGGKGPGGSYYRVSSSAARSRKLCPGRVNRGLSAQSTAATATMGGKNKQRTKGNLRPSNSGRAAELLAKEQGTVPGFIGFGTSQSDLGYVPAIQGAEEIDSLVDSDFRMVLRKLSKKDVTTKLKAMQEFGTMCTERDTETVKGVLPYWPRIFCKISLDHDRRVREATQQAFEKLILKVKKQLAPYLKSLMGYWLMAQCDTYTPAAFAAKDAFEAAFPPSKQPEAIAFCKDEITSVLQDHLIKETPDTLSDPQTVPEEEREAKFYRVVTCSLLALKRLLCLLPDNELDSLEEKFKSLLSQNKFWKYGKHSVPQIRSAYFELVSALCQRIPQLMKEEASKVSPSVLLSIDDSDPIVCPALWEAVLYTLTTIEDCWLHVNAKKSVFPKLSTVIREGGRGLATVIYPYLLPFISKLPQSITNPKLDFFKNFLTSLVAGLSTERTKTSSLESSAVISAFFECLRFIMQQNLGEEEIEQMLVNDQLIPFIDAVLKDPGLQHGQLFNHLAETLSSWEAKADTEKDEKTAHNLENVLIHFWERLSEICVAKISEPEADVESVLGVSNLLQVLQKPKSSLKSSKKKNGKVRFADEILESNKENEKCVSSEGEKIEGWELTTEPSLTHNSSGLLSPLRKKPLEDLVCKLADISINYVNERKSEQHLRFLSTLLDSFSSSRVFKMLLGDEKQSIVQAKPLEIAKLVQKNPAVQFLYQKLIGWLNEDQRKDFGFLVDILYSALRCCDNDMERKKVLDDLTKVDLKWNSLLKIIEKACPSSDKHALVTPWLKGDILGEKLVNLADCLCNEDLESRVSSESHFSERWTLLSLVLSQHVKNDYLIGDVYVERIIVRLHETLFKTKKLSEAESSDSSVSFICDVAYNYFSSAKGCLLMPSSEDLLLTLFQLCAQSKEKTHLPDFLICKLKNTWLSGVNLLVHQTDSSYKESTFLHLSALWLKNQVQASSLDINSLQVLLSAVDDLLNTLLESEDSYLMGVYIGSVMPNDSEWEKMRQSLPMQWLHRPLLEGRLSLNYECFKTDFKEQDIKTLPSHLCTSALLSKMVLIALRKETVLENNELEKIIAELLYSLQWCEELDNPPIFLIGFCEILQKMNITYDNLRVLGNTSGLLQLLFNRSREHGTLWSLIIAKLILSRSISSDEVKPHYKRKESFFPLTEGNLHTIQSLCPFLSKEEKKEFSAQCIPALLGWTKKDLCSTNGGFGHLAIFNSCLQTKSIDDGELLHGILKIIISWKKEHEDIFLFSCNLSEASPEVLGVNIEIIRFLSLFLKYCSSPLAESEWDFIMCSMLAWLETTSENQALYSIPLVQLFACVSCDLACDLSAFFDSTTLDTIGNLPVNLISEWKEFFSQGIHSLLLPILVTVTGENKDVSETSFQNAMLKPMCETLTYISKEQLLSHKLPARLVADQKTNLPEYLQTLLNTLAPLLLFRARPVQIAVYHMLYKLMPELPQYDQDNLKSYGDEEEEPALSPPAALMSLLSIQEDLLENVLGCIPVGQIVTIKPLSEDFCYVLGYLLTWKLILTFFKAASSQLRALYSMYLRKTKSLNKLLYHLFRLMPENPTYAETAVEVPNKDPKTFFTEELQLSIRETTMLPYHIPHLACSVYHMTLKDLPAMVRLWWNSSEKRVFNIVDRFTSKYVSSVLSFQEISSVQTSTQLFNGMTVKARATTREVMATYTIEDIVIELIIQLPSNYPLGSIIVESGKRVGVAVQQWRNWMLQLSTYLTHQNGSIMEGLALWKNNVDKRFEGVEDCMICFSVIHGFNYSLPKKACRTCKKKFHSACLYKWFTSSNKSTCPLCRETFF

SEQ ID NO: 500 - protein, 2214 aa, Homo sapiens
MATRSSRRESRLPFLFTLVALLPPGALCEVWTQRLHGGSAPLPQDRGFLVVQGDPRELRLWARGDARGASRADEKPLRRKRSAALQPEPIKVYGQVSLNDSHNQMVVHWAGEKSNVIVALARDSLALARPKSSDVYVSYDYGKSFKKISDKLNFGLGNRSEAVIAQFYHSPADNKRYIFADAYAQYLWITFDFCNTLQGFSIPFRAADLLLHSKASNLLLGFDRSHPNKQLWKSDDFGQTWIMIQEHVKSFSWGIDPYDKPNTIYIERHEPSGYSTVFRSTDFFQSRENQEVILEEVRDFQLRDKYMFATKVVHLLGSEQQSSVQLWVSFGRKPMRAAQFVTRHPINEYYIADASEDQVFVCVSHSNNRTNLYISEAEGLKFSLSLENVLYYSPGGAGSDTLVRYFANEPFADFHRVEGLQGVYIATLINGSMNEENMRSVITFDKGGTWEFLQAPAFTGYGEKINCELSQGCSLHLAQRLSQLLNLQLRRMPILSKESAPGLIIATGSVGKNLASKTNVYISSSAGARWREALPGPHYYTWGDHGGIITAIAQGMETNELKYSTNEGETWKTFIFSEKPVFVYGLLTEPGEKSTVFTIFGSNKENVHSWLILQVNATDALGVPCTENDYKLWSPSDERGNECLLGHKTVFKRRTPHATCFNGEDFDRPVVVSNCSCTREDYECDFGFKMSEDLSLEVCVPDPEFSGKSYSPPVPCPVGSTYRRTRGYRKISGDTCSGGDVEARLEGELVPCPLAEENEFILYAVRKSIYRYDLASGATEQLPLTGLRAAVALDFDYEHNCLYWSDLALDVIQRLCLNGSTGQEVIINSGLETVEALAFEPLSQLLYWVDAGFKKIEVANPDGDFRLTIVNSSVLDRPRALVLVPQEGVMFWTDWGDLKPGIYRSNMDGSAAYHLVSEDVKWPNGISVDDQWIYWTDAYLECIERITFSGQQRSVILDNLPHPYAIAVFKNEIYWDDWSQLSIFRASKYSGSQMEILANQLTGLMDMKIFYKGKNTGSNACVPRPCSLLCLPKANNSRSCRCPEDVSSSVLPSGDLMCDCPQGYQLKNNTCVKEENTCLRNQYRCSNGNCINSIWWCDFDNDCGDMSDERNCPTTICDLDTQFRCQESGTCIPLSYKCDLEDDCGDNSDESHCEMHQCRSDEYNCSSGMCIRSSWVCDGDNDCRDWSDEANCTAIYHTCEASNFQCRNGHCIPQRWACDGDTDCQDGSDEDPVNCEKKCNGFRCPNGTCIPSSKHCDGLRDCSDGSDEQHCEPLCTHFMDFVCKNRQQCLFHSMVCDGIIQCRDGSDEDAAFAGCSQDPEFHKVCDEFGFQCQNGVCISLIWKCDGMDDCGDYSDEANCENPTEAPNCSRYFQFRCENGHCIPNRWKCDRENDCGDWSDEKDCGDSHILPFSTPGPSTCLPNYYRCSSGTCVMDTWVCDGYRDCADGSDEEACPLLANVTAASTPTQLGRCDRFEFECHQPKTCIPNWKRCDGHQDCQDGRDEANCPTHSTLTCMSREFQCEDGEACIVLSERCDGFLDCSDESDEKACSDELTVYKVQNLQWTADFSGDVTLTWMRPKKMPSASCVYNVYYRVVGESIWKTLETHSNKTNTVLKVLKPDTTYQVKVQVQCLSKAHNTNDFVTLRTPEGLPDAPRNLQLSLPREAEGVIVGHWAPPIHTHGLIREYIVEYSRSGSKMWASQRAASNFTEIKNLLVNTLYTVRVAAVTSRGIGNWSDSKSITTIKGKVIPPPDIHIDSYGENYLSFTLTMESDIKVNGYVVNLFWAFDTHKQERRTLNFRGSILSHKVGNLTAHTSYEISAWAKTDLGDSPLAFEHVMTRGVRPPAPSLKAKAINQTAVECTWTGPRNVVYGIFYATSFLDLYRNPKSLTTSLHNKTVIVSKDEQYLFLVRVVVPYQGPSSDYVVVKMIPDSRLPPRHLHVVHTGKTSVVIKWESPYDSPDQDLLYAIAVKDLIRKTDRSYKVKSRNSTVEYTLNKLEPGGKYHIIVQLGNMSKDSSIKITTVSLSAPDALKIITENDHVLLFWKSLALKEKHFNESRGYEIHMFDSAMNITAYLGNTTDNFFKISNLKMGHNYTFTVQARCLFGNQICGEPAILLYDELGSGADASATQAARSTDVAAVVVPILFLILLSLGVGFAILYTKHRRLQSSFTAFANSHYSSRLGSAIFSSGDDLGEDDEDAPMITGFSDDVPMVIA

SEQ ID NO: 501 - protein, 2004 aa, Homo sapiens
MVKLANPLYTEWILEAIKKVKKQKQRPSEERICNAVSSSHGLDRKTVLEQLELSVKDGTILKVSNKGLNSYKDPDNPGRIALPKPRNHGKLDNKQNVDWNKLIKRAVEGLAESGGSTLKSIERFLKGQKDVSALFGGSAASGFHQQLRLAIKRAIGHGRLLKDGPLYRLNTKATNVDGKESCESLSCLPPVSLLPHEKDKPVAEPIPICSFCLGTKEQNREKKPEELISCADCGNSGHPSCLKFSPELTVRVKALRWQCIECKTCSSCRDQGKNADNMLFCDSCDRGFHMECCDPPLTRMPKGMWICQICRPRKKGRKLLQKKAAQIKRRYTNPIGRPKNRLKKQNTVSKGPFSKVRTGPGRGRKRKITLSSQSASSSSEEGYLERIDGLDFCRDSNVSLKFNKKTKGLIDGLTKFFTPSPDGRKARGEVVDYSEQYRIRKRGNRKSSTSDWPTDNQDGWDGKQENEERLFGSQEIMTEKDMELFRDIQEQALQKVGVTGPPDPQVRCPSVIEFGKYEIHTWYSSPYPQEYSRLPKLYLCEFCLKYMKSRTILQQHMKKCGWFHPPANEIYRKNNISVFEVDGNVSTIYCQNLCLLAKLFLDHKTLYYDVEPFLFYVLTQNDVKGCHLVGYFSKEKHCQQKYNVSCIMILPQYQRKGYGRFLIDFSYLLSKREGQAGSPEKPLSDLGRLSYMAYWKSVILECLYHQNDKQISIKKLSKLTGICPQDITSTLHHLRMLDFRSDQFVIIRREKLIQDHMAKLQLNLRPVDVDPECLRWTPVIVSNSVVSEEEEEEAEEGENEEPQCQERELEISVGKSVSHENKEQDSYSVESEKKPEVMAPVSSTRLSKQVLPHDSLPANSQPSRRGRWGRKNRKTQERFGDKDSKLLLEETSSAPQEQYGECGEKSEATQEQYTESEEQLVASEEQPSQDGKPDLPKRRLSEGVEPWRGQLKKSPEALKCRLTEGSERLPRRYSEGDRAVLRGFSESSEEEEEPESPRSSSPPILTKPTLKRKKPFLHRRRRVRKRKHHNSSVVTETISETTEVLDEPFEDSDSERPMPRLEPTFEIDEEEEEEDENELFPREYFRRLSSQDVLRCQSSSKRKSKDEEEDEESDDADDTPILKPVSLLRKRDVKNSPLEPDTSTPLKKKKGWPKGKSRKPIHWKKRPGRKPGFKLSREIMPVSTQACVIEPIVSIPKAGRKPKIQESEETVEPKEDMPLPEERKEEEEMQAEAEEAEEGEEEDAASSEVPAASPADSSNSPETETKEPEVEEEEEKPRVSEEQRQSEEEQQELEEPEPEEEEDAAAETAQNDDHDADDEDDGHLESTKKKELEEQPTREDVKEEPGVQESFLDANMQKSREKIKDKEETELDSEEEQPSHDTSVVSEQMAGSEDDHEEDSHTKEELIELKEEEEIPHSELDLETVQAVQSLTQEESSEHEGAYQDCEETLAACQTLQSYTQADEDPQMSMVEDCHASEHNSPISSVQSHPSQSVRSVSSPNVPALESGYTQISPEQGSLSAPSMQNMETSPMMDVPSVSDHSQQVVDSGFSDLGSIESTTENYENPSSYDSTMGGSICGNSSSQSSCSYGGLSSSSSLTQSSCVVTQQMASMGSSCSMMQQSSVQPAANCSIKSPQSCVVERPPSNQQQQPPPPPPQQPQPPPPQPQPAPQPPPPQQQPQQQPQPQPQQPPPPPPPQQQPPLSQCSMNNSFTPAPMIMEIPESGSTGNISIYERIPGDFGAGSYSQPSATFSLAKLQQLTNTIMDPHAMPYSHSPAVTSYATSVSLSNTGLAQLAPSHPLAGTPQAQATMTPPPNLASTTMNLTSPLLQCNMSATNIGIPHTQRLQGQMPVKGHISIRSKSAPLPSAAAHQQQLYGRSPSAVAMQAGPRALAVQRGMNMGVNLMPTPAYNVNSMNMNTLNAMNSYRMTQPMMNSSYHSNPAYMNQTAQYPMQMQMGMMGSQAYTQQPMQPNPHGNMMYTGPSHHSYMNAAGVPKQSLNGPYMRR

SEQ ID NO: 502 - protein, 1982 aa, Homo sapiens
MAADDDNGDGTSLFDVFSASPLKNNDEGSLDIYAGLDSAVSDSASKSCVPSRNCLDLYEEILTEEGTAKEATYNDLQVEYGKCQLQMKELMKKFKEIQTQNFSLINENQSLKKNISALIKTARVEINRKDEEISNLHQRLSEFPHFRNNHKTARTFDTVKTKDLKSRSPHLDDCSKTDHRAKSDVSKDVHHSTSLPNLEKEGKPHSDKRSTSHLPTSVEKHCTNGVWSRSHYQVGEGSSNEDSRRGRKDIRHSQFNRGTERVRKDLSTGCGDGEPRILEASQRLQGHPEKYGKGEPKTESKSSKFKSNSDSDYKGERINSSWEKETPGERSHSRVDSQSDKKLERQSERSQNINRKEVKSQDKEERKVDQKPKSVVKDQDHWRRSERASLPHSKNEITFSHNSSKYHLEERRGWEDCKRDKSVNSHSFQDGRCPSSLSNSRTHKNIDSKEVDAMHQWENTPLKAERHRTEDKRKREQESKEENRHIRNEKRVPTEHLQKTNKETKKTTTDLKKQNEPKTDKGEVLDNGVSEGADNKELAMKAESGPNETKNKDLKLSFMKKLNLTLSPAKKQPVSQDNQHKITDIPKSSGVCDSESSMQVKTVAYVPSISEHILGEAAVSEHTMGETKSTLLEPKVALLAVTEPRIGISETNKEDENSLLVRSVDNTMHCEEPICGTETSFPSPMEIQQTESLFPSTGMKQTINNGRAAAPVVMDVLQTDVSQNFGLELDTKRNDNSDYCGISEGMEMKVALSTTVSETTESILQPSIEEADILPIMLSEDNNPKFEPSVIVTPLVESKSCHLEPCLPKETLDSSLQQTELMDHRMATGETNSVYHDDDNSVLSIDLNHLRPIPEAISPLNSPVRPVAKVLRNESPPQVPVYNNSHKDVFLPNSAHSTSKSQSDLNKENQKPIYKSDKCTEADTCKNSPLDELEEGEIRSDSETSKPQESFEKNSKRRVSADVRKSKTIPRRGKSTVCLDKDSRKTHVRIHQTNNKWNKRPDKSSRSSKTEKKDKVMSTSSLEKIVPIIAVPSSEQEIMHMLRMIRKHVRKNYMKFKAKFSLIQFHRIIESAILSFTSLIKHLNLHKISKSVTTLQKNLCDIIESKLKQVKKNGIVDRLFEQQLPDMKKKLWKFVDDQLDYLFAKLKKILVCDSKSFGRDSDEGKLEKTSKQNAQYSNSQKRSVDNSNRELLKEKLSKSEDPVHYKSLVGCKKSEENYQDQNNSSINTVKHDIKKNFNICFDNIKNSQSEERSLEVHCPSTPKSEKNEGSSIEDAQTSQHATLKPERSFEILTEQQASSLTFNLVSDAQMGEIFKSLLQGSDLLDSSVNCTEKSEWELKTPEKQLLETLKCESIPACTTEELVSGVASPCPKMISDDNWSLLSSEKGPSLSSGLSLPVHPDVLDESCMFEVSTNLPLSKDNVCSVEKSKPCVSSILLEDLAVSLTVPSPLKSDGHLSFLKPDMSSSSTPEEVISAHFSEDALLEEEDASEQDIHLALESDNSSSKSSCSSSWTSRSVAPGFQYHPNLPMHAVIMEKSNDHFIVKIRRATPSTSSGLKQSMMPDELLTSLPRHGKEADEGPEKEYISCQNTVFKSVEELENSNKNVDGSKSTHEEQSSMIQTQVPDIYEFLKDASDKMGHSDEVADECFKLHQVWETKVPESIEELPSMEEISHSVGEHLPNTYVDLTKDPVTETKNLGEFIEVTVLHIDQLGCSGGNLNQSAQILDNSLQADTVGAFIDLTQDASSEAKSEGNHPALAVEDLGCGVIQVDEDNCKEEKAQVANRPLKCIVEETYIDLTTESPSSCEVKKDELKSEPGSNCDNSELPGTLHNSHKKRRNISDLNHPHKKQRKETDLTNKEKTKKPTQDSCENTEAHQKKASKKKAPPVTKDPSSLKATPGIKDSSAALATSTSLSAKNVIKKKGEIIILWTRNDDREILLECQKRGPSFKTFAYLAAKLDKNPNQVSERFQQLMKLFEKSKCR

SEQ ID NO: 503 - protein, 1943 aa, Homo sapiens
MEENESQKCEPCLPYSADRRQMQEQGKGNLHVTSPEDAECRRTKERLSNGNSRGSVSKSSRNIPRRHTLGGPRSSKEILGMQTSEMDRKREAFLEHLKQKYPHHASAIMGHQERLRDQTRSPKLSHSPQPPSLGDPVEHLSETSADSLEAMSEGDAPTPFSRGSRTRASLPVVRSTNQTKERSLGVLYLQYGDETKQLRMPNEITSADTIRALFVSAFPQQLTMKMLESPSVAIYIKDESRNVYYELNDVRNIQDRSLLKVYNKDPAHAFNHTPKTMNGDMRMQRELVYARGDGPGAPRPGSTAHPPHAIPNSPPSTPVPHSMPPSPSRIPYGGTRSMVVPGNATIPRDRISSLPVSRPISPSPSAILERRDVKPDEDMSGKNIAMYRNEGFYADPYLYHEGRMSIASSHGGHPLDVPDHIIAYHRTAIRSASAYCNPSMQAEMHMEQSLYRQKSRKYPDSHLPTLGSKTPPASPHRVSDLRMIDMHAHYNAHGPPHTMQPDRASPSRQAFKKEPGTLVYIEKPRSAAGLSSLVDLGPPLMEKQVFAYSTATIPKDRETRERMQAMEKQIASLTGLVQSALFKGPITSYSKDASSEKMMKTTANRNHTDSAGTPHVSGGKMLSALESTVPPSQPPPVGTSAIHMSLLEMRRSVAELRLQLQQMRQLQLQNQELLRAMMKKAELEISGKVMETMKRLEDPVQRQRVLVEQERQKYLHEEEKIVKKLCELEDFVEDLKKDSTAASRLVTLKDVEDGAFLLRQVGEAVATLKGEFPTLQNKMRAILRIEVEAVRFLKEEPHKLDSLLKRVRSMTDVLTMLRRHVTDGLLKGTDAAQAAQYMAMEKATAAEVLKSQEEAAHTSGQPFHSTGAPGDAKSEVVPLSGMMVRHAQSSPVVIQPSQHSVALLNPAQNLPHVASSPAVPQEATSTLQMSQAPQSPQIPMNGSAMQSLFIEEIHSVSAKNRAVSIEKAEKKWEEKRQNLDHYNGKEFEKLLEEAQANIMKSIPNLEMPPATGPLPRGDAPVDKVELSEDSPNSEQDLEKLGGKSPPPPPPPPRRSYLPGSGLTTTRSGDVVYTGRKENITAKASSEDAGPSPQTRATKYPAEEPASAWTPSPPPVTTSSSKDEEEEEEEGDKIMAELQAFQKCSFMDVNSNSHAEPSRADSHVKDTRSGATVPPKEKKNLEFFHEDVRKSDVEYENGPQMEFQKVTTGAVRPSDPPKWERGMENSISDASRTSEYKTEIIMKENSISNMSLLRDSRNYSQETVPKASFGFSGISPLEDEINKGSKISGLQYSIPDTENQTLNYGKTKEMEKQNTDKCHVSSHTRLTESSVHDFKTEDQEVITTDFGQVVLRPKEARHANVNPNEDGESSSSSPTEENAATDNIAFMITETTVQVLSSGEVHDIVSQKGEDIQTVNIDARKEMTPRQEGTDNEDPVVCLDKKPVIIIFDEPMDIRSAYKRLSTIFEECDEELERMMMEEKIEEEEEEENGDSVVQNNNTSQMSHKKVAPGNLRTGQQVETKSQPHSLATETRNPGGQEMNRTELNKFSHVDSPNSECKGEDATDDQFESPKKKFKFKFPKKQLAALTQAIRTGTKTGKKTLQVVVYEEEEEDGTLKQHKEAKRFEIARSQPEDTPENTVRRQEQPSIESTSPISRTDEIRKNTYRTLDSLEQTIKQLENTISEMSPKALVDTSCSSNRDSVASSSHIAQEASPRPLLVPDEGPTALEPPTSIPSASRKGSSGAPQTSRMPVPMSAKNRPGTLDKPGKQSKLQDPRQYRQANGSAKKSGGDFKPTSPSLPASKIPALSPSSGKSSSLPSSSGDSSNLPNPPATKPSIASNPLSPQTGPPAHSASLIPSVSNGSLKFQSLTHTGKGHHLSFSPQSQNGRAPPPLSFSSSPPSPASSVSLNQGAKGTRTIHTPSLTSYKAQNGSSSKATPSTAKETS

SEQ ID NO: 504 - protein, 1812 aa, Homo sapiens
MAVDSAMELLFLDTFKHPSAEQSSHIDVVRFPCVVYINEVRVIPPGVRAHSSLPDNRAYGETSPHTFQLDLFFNNVSKPSAPVFDRLGSLEYDENTSIIFRPNSKVNTDGLVLRGWYNCLTLAIYGSVDRVISHDRDSPPPPPPPPPPPQPQPSLKRNPKHADGEKEDQFNGSPPRPQPRGPRTPPGPPPPDDDEDDPVPLPVSGDKEEDAPHREDYFEPISPDRNSVPQEGQYSDEGEVEEEQQEEGEEDEDDVDVEEEEDEDEDDRRTVDSIPEEEEEDEEEEGEEDEEGEGDDGYEQISSDEDGIADLERETFKYPNFDVEYTAEDLASVPPMTYDPYDRELVPLLYFSCPYKTTFEIEISRMKDQGPDKENSGAIEASVKLTELLDLYREDRGAKWVTALEEIPSLIIKGLSYLQLKNTKQDSLGQLVDWTMQALNLQVALRQPIALNVRQLKAGTKLVSSLAECGAQGVTGLLQAGVISGLFELLFADHVSSSLKLNAFKALDSVISMTEGMEAFLRGRQNEKSGYQKLLELILLDQTVRVVTAGSAILQKCHFYEVLSEIKRLGDHLAEKTSSLPNHSEPDHDTDAGLERTNPEYENEVEASMDMDLLESSNISEGEIERLINLLEEVFHLMETAPHTMIQQPVKSFPTMARITGPPERDDPYPVLFRYLHSHHFLELVTLLLSIPVTSAHPGVLQATKDVLKFLAQSQKGLLFFMSEYEATNLLIRALCHFYDQDEEEGLQSDGVIDDAFALWLQDSTQTLQCITELFSHFQRCTASEETDHSDLLGTLHNLYLITFNPVGRSAVGHVFSLEKNLQSLITLMEYYSKEALGDSKSKKSVAYNYACILILVVVQSSSDVQMLEQHAASLLKLCKADENNAKLQELGKWLEPLKNLRFEINCIPNLIEYVKQNIDNLMTPEGVGLTTALRVLCNVACPPPPVEGQQKDLKWNLAVIQLFSAEGMDTFIRVLQKLNSILTQPWRLHVNMGTTLHRVTTISMARCTLTLLKTMLTELLRGGSFEFKDMRVPSALVTLHMLLCSIPLSGRLDSDEQKIQNDIIDILLTFTQGVNEKLTISEETLANNTWSLMLKEVLSSILKVPEGFFSGLILLSELLPLPLPMQTTQVIEPHDISVALNTRKLWSMHLHVQAKLLQEIVRSFSGTTCQPIQHMLRRICVQLCDLASPTALLIMRTVLDLIVEDLQSTSEDKEKQYTSQTTRLLALLDALASHKACKLAILHLINGTIKGDERYAEIFQDLLALVRSPGDSVIRQQCVEYVTSILQSLCDQDIALILPSSSEGSISELEQLSNSLPNKELMTSICDCLLATLANSESSYNCLLTCVRTMMFLAEHDYGLFHLKSSLRKNSSALHSLLKRVVSTFSKDTGELASSFLEFMRQILNSDTIGCCGDDNGLMEVEGAHTSRTMSINAAELKQLLQSKEESPENLFLELEKLVLEHSKDDDNLDSLLDSVVGLKQMLESSGDPLPLSDQDVEPVLSAPESLQNLFNNRTAYVLADVMDDQLKSMWFTPFQAEEIDTDLDLVKVDLIELSEKCCSDFDLHSELERSFLSEPSSPGRTKTTKGFKLGKHKHETFITSSGKSEYIEPAKRAHVVPPPRGRGRGGFGQGIRPHDIFRQRKQNTSRPPSMHVDDFVAAESKEVVPQDGIPPPKRPLKVSQKISSRGGFSGNRGGRGAFHSQNRFFTPPASKGNYSRREGTRGSSWSAQNTPRGNYNESRGGQSNFNRGPLPPLRPLSSTGYRPSPRDRASRGRGGLGPSWASANSGSGGSRGKFVSGGSGRGRHVRSFTR

SEQ ID NO: 505 - protein, 1873 aa, Homo sapiens
MFSRRSHGDVKKSTQKVLDPKKDVLTRLKHLRALLDNVDANDLKQFFETNYSQIYFIFYENFIALENSLKLKGNNKSQREELDSILFLFEKILQFLPERIFFRWHYQSIGSTLKKLLHTGNSIKIRCEGIRLFLLWLQALQTNCAEEQVLIFACLVPGFPAVMSSRGPCTLETLINPSPSVADVKIYPEEITPLLPAISGEKIAEDQTCFFLQILLKYMVIQAASLEWKNKENQDTGFKFLFTLFRKYYLPHLFPSFTKLTNIYKPVLDIPHLRPKPVYITTTRDNENIYSTKIPYMAARVVFIKWIVTFFLEKKYLTATQNTKNGVDVLPKIIQTVGGGAVQERAPELDGGGPTEQDKSHSNSSTLSDRRLSNSSLCSIEEEHRMVYEMVQRILLSTRGYVNFVNEVFHQAFLLPSCEIAVTRKVVQVYRKWILQDKPVFMEEPDRKDVAQEDAEKLGFSETDSKEASSESSGHKRSSSWGRTYSFTSAMSRGCVTEEENTNVKAGVQALLQVFLTNSANIFLLEPCAEVPVLLKEQVDACKAVLIIFRRMIMELTMNKKTWEQMLQILLRITEAVMQKPKDKQIKDLFAQSLAGLLFRTLMVAWIRANLCVYISRELWDDFLGVLSSLTEWEELINEWANIMDSLTAVLARTVYGVEMTNLPLDKLSEQKEKKQRGKGCVLDPQKGTTVGRSFSLSWRSHPDVTEPMRFRSATTSGAPGVEKARNIVRQKATEVEECQQSENAPAAGSGHLTVGQQQQVLRSSSTSDIPEPLCSDSSQGQKAENTQNSSSSEPQPIQENKGHVKREHEGITILVRRSSSPAELDLKDDLQQTQGKCRERQKSESTNSDTTLGCTNEAELSMGPWQTCEEDPELNTPTDVVADADARHWLQLSPTDASNLTDSSECLTDDCSIIAGGSLTGWHPDSAAVLWRRVLGILGDVNNIQSPKIHARVFCYLYELWYKLAKIRDNLAISLDNQSSPSPPVLIPPLRMFASWLFKAATLPNEYKEGKLQAYRLICAMMTRRQDVLPNSDFLVHFYLVMHLGLTSEDQDILNTIIRHCPPRFFSLGFPGFSMLVGDFITAAARVLSTDILTAPRSEAVTVLGSLVCFPNTYQEIPLLQSVPEVNEAITGTEDVKHYLINILLKNATEEPNEYARCIAVCSLGVWICEELAQCTSHPQVKEAINVIGVTLKFPNKIVAQVACDVLQLLVSYWEKLQMFETSLPRKMAEILVATVAFLLPSAEYSSVETDKKFIVSLLLCLLDWCMALPVSVLLHPVSTAVLEEQHSARAPLLDYIYRVLHCCVCGSSTYTQQSHYILTLADLSSTDYDPFLPLANVKSSEPVQYHSSAELGNLLTVEEEKKRRSLELIPLTARMVMAHLVNHLGHYPLSGGPAILHSLVSENHDNAHVEGSELSFEVFRSPNLQLFVFNDSTLISYLQTPTEGPVGGSPVGSLSDVRVIVRDISGKYSWDGKVLYGPLEGCLAPNGRNPSFLISSWHRDTFGPQKDSSQVEEGDDVLDKLLENIGHTSPECLLPSQLNLNEPSLTPCGMNYDQEKEIIEVILRQNAQEDEYIQSHNFDSAMKVTSQGQPSPVEPRGPFYFCRLLLDDLGMNSWDRRKNFHLLKKNSKLLRELKNLDSRQCRETHKIAVFYIAEGQEDKCSILSNERGSQAYEDFVAGLGWEVDLSTHCGFMGGLQRNGSTGQTAPYYATSTVEVIFHVSTRMPSDSDDSLTKKLRHLGNDEVHIVWSEHSRDYRRGIIPTAFGDVSIIIYPMKNHMFFIAITKKPEVPFFGPLFDGAIVSGKLLPSLVCATCINASRAVKCLIPLYQSFYEERALYLEAIIQNHREVMTFEDFAAQVFSPSPSYSLSGTD

SEQ ID NO: 506 - protein, 1801 aa, Homo sapiens
MAVPGSFPLLVEGSWGPDPPKNLNTKLQMYFQSPKRSGGGECEVRQDPRSPSRFLVFFYPEDVRQKVLERKNHELVWQGKGTFKLTVQLPATPDEIDHVFEEELLTKESKTKEDVKEPDVSEELDTKLPLDGGLDKMEDIPEECENISSLVAFENLKANVTDIMLILLVENISGLSNDDFQVEIIRDFDVAVVTFQKHIDTIRFVDDCTKHHSIKQLQLSPRLLEVTNTIRVENLPPGADDYSLKLFFENPYNGGGRVANVEYFPEESSALIEFFDRKVLDTIMATKLDFNKMPLSVFPYYASLGTALYGKEKPLIKLPAPFEESLDLPLWKFLQKKNHLIEEINDEMRRCHCELTWSQLSGKVTIRPAATLVNEGRPRIKTWQADTSTTLSSIRSKYKVNPIKVDPTMWDTIKNDVKDDRILIEFDTLKEMVILAGKSEDVQSIEVQVRELIESTTQKIKREEQSLKEKMIISPGRYFLLCHSSLLDHLLTECPEIEICYDRVTQHLCLKGPSADVYKAKCEIQEKVYTMAQKNIQVSPEIFQFLQQVNWKEFSKCLFIAQKILALYELEGTTVLLTSCSSEALLEAEKQMLSALNYKRIEVENKEVLHGKKWKGLTHNLLKKQNSSPNTVIINELTSETTAEVIITGCVKEVNETYKLLFNFVEQNMKIERLVEVKPSLVIDYLKTEKKLFWPKIKKVNVQVSFNPENKQKGILLTGSKTEVLKAVDIVKQVWDSVCVKSVHTDKPGAKQFFQDKARFYQSEIKRLFGCYIELQENEVMKEGGSPAGQKCFSRTVLAPGVVLIVQQGDLARLPVDVVVNASNEDLKHYGGLAAALSKAAGPELQADCDQIVKREGRLLPGNATISKAGKLPYHHVIHAVGPRWSGYEAPRCVYLLRRAVQLSLCLAEKYKYRSIAIPAISSGVFGFPLGRCVETIVSAIKENFQFKKDGHCLKEIYLVDVSEKTVEAFAEAVKTVFKATLPDTAAPPGLPPAAAGPGKTSWEKGSLVSPGGLQMLLVKEGVQNAKTDVVVNSVPLDLVLSRGPLSKSLLEKAGPELQEELDTVGQGVAVSMGTVLKTSSWNLDCRYVLHVVAPEWRNGSTSSLKIMEDIIRECMEITESLSLKSIAFPAIGTGNLGFPKNIFAELIISEVFKFSSKNQLKTLQEVHFLLHPSDHENIQAFSDEFARRANGNLVSDKIPKAKDTQGFYGTVSSPDSGVYEMKIGSIIFQVASGDITKEEADVIVNSTSNSFNLKAGVSKAILECAGQNVERECSQQAQQRKNDYIITGGGFLRCKNIIHVIGGNDVKSSVSSVLQECEKKNYSSICLPAIGTGNAKQHPDKVAEAIIDAIEDFVQKGSAQSVKKVKVVIFLPQVLDVFYANMKKREGTQLSSQQSVMSKLASFLGFSKQSPQKKNHLVLEKKTESATFRVCGENVTCVEYAISWLQDLIEKEQCPYTSEDECIKDFDEKEYQELNELQKKLNINISLDHKRPLIKVLGISRDVMQARDEIEAMIKRVRLAKEQESRADCISEFIEWQYNDNNTSHCFNKMTNLKLEDARREKKKTVDVKINHRHYTVNLNTYTATDTKGHSLSVQRLTKSKVDIPAHWSDMKQQNFCVVELLPSDPEYNTVASKFNQTCSHFRIEKIERIQNPDLWNSYQAKKKTMDAKNGQTMNEKQLFHGTDAGSVPHVNRNGFNRSYAGKNAVAYGKGTYFAVNANYSANDTYSRPDANGRKHVYYVRVLTGIYTHGNHSLIVPPSKNPQNPTDLYDTVTDNVHHPSLFVAFYDYQAYPEYLITFRK

SEQ ID NO: 507 - protein, 882 aa, Homo sapiens
MGPWSRSLSALLLLLQVSSWLCQEPEPCHPGFDAESYTFTVPRRHLERGRVLGRVNFEDCTGRQRTAYFSLDTRFKVGTDGVITVKRPLRFHNPQIHFLVYAWDSTYRKFSTKVTLNTVGHHHRPPPHQASVSGIQAELLTFPNSSPGLRRQKRDWVIPPISCPENEKGPFPKNLVQIKSNKDKEGKVFYSITGQGADTPPVGVFIIERETGWLKVTEPLDRERIATYTLFSHAVSSNGNAVEDPMEILITVTDQNDNKPEFTQEVFKGSVMEGALPGTSVMEVTATDADDDVNTYNAAIAYTILSQDPELPDKNMFTINRNTGVISVVTTGLDRESFPTYTLVVQAADLQGEGLSTTATAVITVTDTNDNPPIFNPTTYKGQVPENEANVVITTLKVTDADAPNTPAWEAVYTILNDDGGQFVVTTNPVNNDGILKTAKGLDFEAKQQYILHVAVTNVVPFEVSLTTSTATVTVDVLDVNEAPIFVPPEKRVEVSEDFGVGQEITSYTAQEPDTFMEQKITYRIWRDTANWLEINPDTGAISTRAELDREDFEHVKNSTYTALIIATDNGSPVATGTGTLLLILSDVNDNAPIPEPRTIFFCERNPKPQVINIIDADLPPNTSPFTAELTHGASANWTIQYNDPTQESIILKPKMALEVGDYKINLKLMDNQNKDQVTTLEVSVCDCEGAAGVCRKAQPVEAGLQIPAILGILGGILALLILILLLLLFLRRRAVVKEPLLPPEDDTRDNVYYYDEEGGGEEDQDFDLSQLHRGLDARPEVTRNDVAPTLMSVPRYLPRPANPDEIGNFIDENLKAADTDPTAPPYDSLLVFDYEGSGSEAASLSSLNSSESDKDQDYDYLNEWGNRFKKLADMYGGGEDD

SEQ ID NO: 508 - protein, 1883 aa, Homo sapiens
MPVGRIECPSSPSFPRDISHECRVCGVTEVGLSAYAKHISGQLHKDNVDAQEREDDGKGEEEEEDYFDKELIQLIKQRKEQSRQDEPSNSNQEINSDDRRPQWRREDRIPYQDRESYSQPAWHHRGPPQRDWKWEKDGFNNTRKNSFPHSLRNGGGPRGRSGWHKGVAGGSSTWFHNHSNSGGGWLSNSGAVDWNHNGTGRNSSWLSEGTGGFSSWHMNNSNGNWKSSVRSTNNWNYSGPGDKFQPGRNRNSNCQMEDMTMLWNKKSNKSNKYSHDRYNWQRQENDKLGTVATYRGPSEGFTSDKFPSEGLLDFNFEQLESQTTKQADTATSKVSGKNGSAAREKPRRWTPYPSQKTLDLQSGLKDITGNKSEMIEKPLFDFSLITTGIQEPQTDETRNSPTQKTQKEIHTGSLNHKASSDSAASFEVVRQCPTAEKPEQEHTPNKMPSLKSPLLPCPATKSLSQKQDPKNISKNTKTNFFSPGEHSNPSNKPTVEDNHGPYISKLRSSCPHVLKGNKSTFGSQKQSGDNLNDTLRKAKEVLQCHESLQNPLLSTSKSTRNYAKASRNVEESEKGSLKIEFQVHALEDESDGETSDTEKHGTKIGTLGSATTELLSGSTRTADEKEEDDRILKTSRELSTSPCNPIVRQKESELQMTSAASPHPGLLLDLKTSLEDAQVDDSIKSHVSYETEGFESASLDAELQKSDISQPSGPLLPELSKLGFPASLQRDLTRHISLKSKTGVHLPEPNLNSARRIRNISGHRKSETEKESGLKPTLRQILNASRRNVNWEQVIQQVTKKKQELGKGLPRFGIEMVPLVQNEQEALDLDGEPDLSSLEGFQWEGVSISSSPGLARKRSLSESSVIMDRAPSVYSFFSEEGTGKENEPQQMVSPSNSLRAGQSQKATMHLKQEVTPRAASLRTGERAENVATQRRHSAQLSSDHIIPLMHLAKDLNSQERSIPPSENQNSQESNGEGNCLSSSASSALAISSLADAATDSSCTSGAEQNDGQSIRKKRRATGDGSSPELPSLERKNKRRKIKGKKERSQVDQLLNISLREEELSKSLQCMDNNLLQARAALQTAYVEVQRLLMLKQQITMEMSALRTHRIQILQGLQETYEPSEHPDQVPCSLTRERRNSRSQTSIDAALLPTPFFPLFLEPPSSHVSPSPTGASLQITTSPTFQTHGSVPAPDSSVQIKQEPMSPEQDENVNAVPPSSACNVSKELLEANREISDSCPVYPVITARLSLPESTESFHEPSQELKFSVEQRNTRNRENSPSSQSAGLSSINKEGEEPTKGNSGSEACTSSFLRLSFASETPLEKEPHSPADQPEQQAESTLTSAETRGSKKKKKLRKKKSLRAAHVPENSDTEQDVLTVKPVRKVKAGKLIKGGKVTTSTWEDSRTGREQESVRDEPDSDSSLEVLEIPNPQLEVVAIDSSESGEEKPDSPSKKDIWNSTEQNPLETSRSGCDEVSSTSEIGTRYKDGIPVSVAETQTVISSIKGSKNSSEISSEPGDDDEPTEGSFEGHQAAVNAIQIFGNLLYTCSADKTVRVYNLVSRKCIGVFEGHTSKVNCLLVTQTSGKNAALYTGSSDHTIRCYNVKSRECVEQLQLEDRVLCLHSRWRILYAGLANGTVVTFNIKNNKRLEIFECHGPRAVSCLATAQEGARKLLVVGSYDCTISVRDARNGLLLRTLEGHSKTILCMKVVNDLVFSGSSDQSVHAHNIHTGELVRIYKGHNHAVTVVNILGKVMVTACLDKFVRVYELQSHDRLQVYGGHKDMIMCMTIHKSMIYTGCYDGSIQAVRLNLMQNYRCWWHGCSLIFGVVDHLKQHLLTDHTNPNFQTLKCRWKNCDAFFTARKGSKQDAAGHIERHAEDDSKIDS

SEQ ID NO: 509 - protein, 1944 aa, Homo sapiens
MEAAEGQGTLPRRPHNECWPEEAGPALGPGSRSGLHPAHSHAQDGSSESSYKHHPALSPIARGPSGVPLRGATVFPSLRTIPVVRASNPAHNGRVCSTWGSFHYKTFDGDVFRFPGLCNYVFSEHCGAAYEDFNIQLRRSQESAAPTLSRVLMKVDGVVIQLTKGSVLVNGHPVLLPFSQSGVLIQQSSSYTKVEARLGLVLMWNHDDSLLLELDTKYANKTCGLCGDFNGMPVVSELLSHNTKLTPMEFGNLQKMDDPTEQCQDPVPEPPRNCSTGFGICEELLHGQLFSGCVALVDVGSYLEACRQDLCFCEDTDLLSCVCHTLAEYSRQCTHAGGLPQDWRGPDFCPQKCPNNMQYHECRSPCADTCSNQEHSRACEDHCVAGCFCPEGTVLDDIGQTGCVPVSKCACVYNGAAYAPGATYSTDCTNCTCSGGRWSCQEVPCPGTCSVLGGAHFSTFDGKQYTVHGDCSYVLTKPCDSSAFTVLAELRRCGLTDSETCLKSVTLSLDGVQTVVVIKASGEVFLNQIYTQLPISAANVTIFRPSTFFIIAQTSLGLQLNLQLVPTMQLFMQLAPKLRGQTCGLCGNFNSIQADDFRTLSGVVEATAAAFFNTFKTQAACPNIRNSFEDPCSLSVENEKYAQHWCSQLTDADGPFGRCHAAVKPGTYYSNCMFDTCNCERSEDCLCAALSSYVHACAAKGVQLGGWRDGVCTKPMTTCPKSMTYHYHVSTCQPTCRSLSEGDITCSVGFIPVDGCICPKGTFLDDTGKCVQASNCPCYHRGSMIPNGESVHDSGAICTCTHGKLSCIGGQAPAPVCAAPMVFFDCRNATPGDTGAGCQKSCHTLDMTCYSPQCVPGCVCPDGLVADGEGGCITAEDCPCVHNEASYRAGQTIRVGCNTCTCDSRMWRCTDDPCLATCAVYGDGHYLTFDGQSYSFNGDCEYTLVQNHCGGKDSTQDSFRVVTENVPCGTTGTTCSKAIKIFLGGFELKLSHGKVEVIGTDESQEVPYTIRQMGIYLVVDTDIGLVLLWDKKTSIFINLSPEFKGRVCGLCGNFDDIAVNDFATRSRSVVGDVLEFGNSWKLSPSCPDALAPKDPCTANPFRKSWAQKQCSILHGPTFAACHAHVEPARYYEACVNDACACDSGGDCECFCTAVAAYAQACHEVGLCVSWRTPSICPLFCDYYNPEGQCEWHYQPCGVPCLRTCRNPRGDCLRDVWGLEGCYPKCPPEAPIFDEDKMQCVATCPTPPLPPRCHVHGKSYRPGAVVPSDKNCQSCLCTERGVECTYKAEACVCTYNGQRFHPGDVIYHTTDGTGGCISARCGANGTIERRVYPCSPTTPVPPTTFSFSTPPLVVSSTHTPSNGPSSAHTGPPSSAWPTTAGTSPRTRLPTASASLPPVCGEKCLWSPWMDVSRPGRGTDSGDFDTLENLRAHGYRVCESPRSVECRAEDAPGVPLRALGQRVQCSPDVGLTCRNREQASGLCYNYQIRVQCCTPLACSTSSSPAQTTPPTTSKTTETRASGSSAPSSTPGTVSLSTARTTPAPGTATSVKKTFSTPSPPPVPATSTSSMSTTTPGTSVVSSKPTLTEPSTSSCLQELCTWTEWIDGSYPAPGINGGDFDTFQNLRDEGYTFCESPRSVQCRAESFPNTPLADLGQDVICSHTEGLICLNKNQLPPICYNYEIRIQCCETVNVCRDITRPPKTVATTRPTPHPTGAQTQTTFTTHMPSASTEQPTATSRGGPTATSVTQGTHTTPVTRNCHPRCTWTKWFDVDFPSPGPHGGDKETYNNIIRSGEKICRRPEEITRLQCRAKSHPEVSIEHLGQVVQCSREEGLVCRNQDQQGPFKMCLNYEVRVLCCETPRGCPVTSTPVTAPSTPSGRAISPTQSTSSWQKSRTTTLHNLCSYSQNNLCSYNQNNLCLSSQHNLWSWKYSQPCSYHQHNLCSYN

SEQ ID NO: 510 - protein, 2442 aa, Homo sapiens
METRSPGLNNMKPQSLQLVLEEQVLALQQQMAENQAASWRKLKNSQEAQQRQATLVRKLQAKVLQYRSWCQELEKRLEATGGPIPQRWENVEEPNLDELLVRLEEEQQRCESLAEVNTQLRLHMEKADVVNKALREDVEKLTVDWSRARDELMRKESQWQMEQEFFKGYLKGEHGRLLSLWREVVTFRRHFLEMKSATDRDLMELKAEHVRLSGSLLTCCLRLTVGAQSREPNGSGRMDGREPAQLLLLLAKTQELEKEAHERSQELIQLKSQGDLEKAELQDRVTELSALLTQSQKQNEDYEKMIKALRETVEILETNHTELMEHEASLSRNAQEEKLSLQQVIKDITQVMVEEGDNIAQGSGHENSLELDSSIFSQFDYQDADKALTLVRSVLTRRRQAVQDLRQQLAGCQEAVNLLQQQHDQWEEEGKALRQRLQKLTGERDTLAGQTVDLQGEVDSLSKERELLQKAREELRQQLEVLEQEAWRLRRVNVELQLQGDSAQGQKEEQQEELHLAVRERERLQEMLMGLEAKQSESLSELITLREALESSHLEGELLRQEQTEVTAALARAEQSIAELSSSENTLKTEVADLRAAAVKLSALNEALALDKVGLNQQLLQLEEENQSVCSRMEAAEQARNALQVDLAEAEKRREALWEKNTHLEAQLQKAEEAGAELQADLRDIQEEKEEIQKKLSESRHQQEAATTQLEQLHQEAKRQEEVLARAVQEKEALVREKAALEVRLQAVERDRQDLAEQLQGLSSAKELLESSLFEAQQQNSVIEVTKGQLEVQIQTVTQAKEVIQGEVRCLKLELDTERSQAEQERDAAARQLAQAEQEGKTALEQQKAAHEKEVNQLREKWEKERSWHQQELAKALESLEREKMELEMRLKEQQTEMEAIQAQREEERTQAESALCQMQLETEKERVSLLETLLQTQKELADASQQLERLRQDMKVQKLKEQETTGILQTQLQEAQRELKEAARQHRDDLAALQEESSSLLQDKMDLQKQVEDLKSQLVAQDDSQRLVEQEVQEKLRETQEYNRIQKELEREKASLTLSLMEKEQRLLVLQEADSIRQQELSALRQDMQEAQGEQKELSAQMELLRQEVKEKEADFLAQEAQLLEELEASHITEQQLRASLWAQEAKAAQLQLRLRSTESQLEALAAEQQPGNQAQAQAQLASLYSALQQALGSVCESRPELSGGGDSAPSVWGLEPDQNGARSLFKRGPLLTALSAEAVASALHKLHQDLWKTQQTRDVLRDQVQKLEERLTDTEAEKSQVHTELQDLQRQLSQNQEEKSKWEGKQNSLESELMELHETMASLQSRLRRAELQRMEAQGERELLQAAKENLTAQVEHLQAAVVEARAQASAAGILEEDLRTARSALKLKNEEVESERERAQALQEQGELKVAQGKALQENLALLTQTLAEREEEVETLRGQIQELEKQREMQKAALELLSLDLKKRNQEVDLQQEQIQELEKCRSVLEHLPMAVQEREQKLTVQREQIRELEKDRETQRNVLEHQLLELEKKDQMIESQRGQVQDLKKQLVTLECLALELEENHHKMECQQKLIKELEGQRETQRVALTHLTLDLEERSQELQAQSSQIHDLESHSTVLARELQERDQEVKSQREQIEELQRQKEHLTQDLERRDQELMLQKERIQVLEDQRTRQTKILEEDLEQIKLSLRERGRELTTQRQLMQERAEEGKGPSKAQRGSLEHMKLILRDKEKEVECQQEHIHELQELKDQLEQQLQGLHRKVGETSLLLSQREQEIVVLQQQLQEAREQGELKEQSLQSQLDEAQRALAQRDQELEALQQEQQQAQGQEERVKEKADALQGALEQAHMTLKERHGELQDHKEQARRLEEELAVEGRRVQALEEVLGDLRAESREQEKALLALQQQCAEQAQEHEVETRALQDSWLQAQAVLKERDQELEALRAESQSSRHQEEAARARAEALQEALGKAHAALQGKEQHLLEQAELSRSLEASTATLQASLDACQAHSRQLEEALRIQEGEIQDQDLRYQEDVQQLQQALAQRDEELRHQQEREQLLEKSLAQRVQENMIQEKQNLGQEREEEEIRGLHQSVRELQLTLAQKEQEILELRETQQRNNLEALPHSHKTSPMEEQSLKLDSLEPRLQRELERLQAALRQTEAREIEWREKAQDLALSLAQTKASVSSLQEVAMFLQASVLERDSEQQRLQDELELTRRALEKERLHSPGATSTAELGSRGEQGVQLGEVSGVEAEPSPDGMEKQSWRQRLEHLQQAVARLEIDRSRLQRHNVQLRSTLEQVERERRKLKREAMRAAQAGSLEISKATASSPTQQDGRGQKNSDAKCVAELQKEVVLLQAQLTLERKQKQDYITRSAQTSRELAGLHHSLSHSLLAVAQAPEATVLEAETRRLDESLTQSLTSPGPVLLHPSPSTTQAASR

SEQ ID NO: 511 - protein, 1578 aa, Homo sapiens
MEELETSLFQTRKAHRIEQMVARWLRRSRDSSARAKVAAADGPARNPTQTLIPVRHTVKIDKDTLLQDYGFHISESLPLTVVAVTAGGSAHGKLFPGDQILQMNNEPAEDLSWERAVDILREAEDSLSITVVRCTSGVPKSSFLTEEKRARLKTNPVKVHFAEEVLISGHSQGNSLLCMPNVLKLYLENGQTKAFKFEANTTVKDIILTVKEKLSIRSIEYFALALEEQYSISRLHLLHEEELIQQVVEREESHDYRCLFRVCFVPKDPLDLLKEDPVAFEYLYLQSCSDVLQERFAVEMKCSSALRLAALHIQERIYACAQPQKISLKYIEKDWGIENFISPTLLRNMKGKDIKKAISFHMKRNQNLLEPRQKQLISAAQLRLNYLQILGELKTYGGRIFNATLMLQDRESYIALLVGAKYGISQVINSKLNIMSTLAEFANISRVELTEESEKVSVVKVYLQDVKVLTLLLESNSAKDLACLIAGYYRLLVDPVTSIFLWPGNKQQAHRVSAEEGYESRACSDSEESSEVDCVLEPLSDRRLVKLAPCRSLIKEEQPPGNSPTPEVARRGPSTCGASSTTDSAESEASDSANTESRGYRTSGSSESMDALEEDDLDTCSSSRSTFFHFGSPGLAESIDSDSQEERSGIETSGFLCLLDLAQRANPQCQKTEFSESAALETFGWAPELSTVRLDPRLYEGSHADYYSLCSSVSPASYLSDSSESTASRQGGAPPAWGQQGWTEAQPSSMLEPLALHPPLAFEDGSSDEEYYDAADKLTPPGPPSGPRDVSTAEPSATSLQNKASTSSPENSLPCGPDGRQPSRRGGVKKYAKTLRKRRSFLQTDYTSQVSFPLVPSASLESVDDVCYYDREPYLALGAPSPTVSSLQDMQGEPGLLETKALGLLAPLRETKSTNPASRVMEMEPETMETKSVIDSRVSSISAIRFRIDPNNKENSGVVPAASSSASTPHCSNPGSSGPDTAQARPSQILPLSQDLDGIAPKEPTIEHGDSSFSLSSGDPNPDRACLASNPGLNNVSQGDTLELQLEPHVQLEMGLESFCTNHIQETAPKYTEPLLSPRDEPRSDECGINPGEKIASIPTKEEPQGQLSLERDREVTNKNGTNVFQEESRKDSGDSPGDVSNNVSQTLDISSPAGKIVTSLSLDAPVTGTEQIPPHPPRDPQGQSREPPGQGCQAQEQKLFVELDLDPDFFLGKQTVSPAVPPEGIKAEAPNHVTGQDIAPRDSPEWVCFNPEPSLPEPLPCPQEDPHLETSNHCLLSEGKSDSSSICLSAEKSFLCFAPESHPEVSASLRVATSLGFAGMNEMVAPRIGMDQCSCQFSYATCFRGPQPETEEEDRDLEAHPMAPLTSPPSAGSPVVLPWRPARAHSCTTAPLSRKSHIWPEYCSRALRQLKATPASTPEGFIQLMESLLELQDILETSWGVGNKHPPEKCTWHFTESRSRLCMGSQKLLSSCRHVIRMDQSPEEMQGAVRDTFQHLVQLAGLCFQFTDCSRCSARHREAAGNLRDVVYTYHQFIEAAKSTCERGYHDLSVKLLARQCTALTAAVFCLTQKFRASTAL

SEQ ID NO: 512 - protein, 1354 aa, Homo sapiens
MSSTADLLDTILKAIEENITTENSCSLLMALDTLLNSDSTKEMGFTCKIQALRDKLWIFLVQSFYAVRHTESWKLMSTDDQQKIQAAAFDKGDDRRLGKKPIFSSSQQRKQVSDSGDIKIKSWRGNNKKECWSYLSTNKKMKSDGLGASGHSSSTNRNSINKTLKQDDVKEKDGTKIASKITKELKTGGKNVSGKPKTVTKSKTENGDKARLENMSPRQVVERSATAAAAATGQKNLLNGKGVRNQEGQISGARPKVLTGNLNVQAKAKPLKKATGKDSPCLSIAGPSSRSTDSSMEFSISTECLDEPKENGSTEEEKPSGHKLSFCDSPGQMMKNSVDSVKNSTVAIKSRPVSRVTNGTSNKKSIHEQDTNVNNSVLKKVSGKGCSEPVPQAILKKRGTSNGCTAAQQRTKSTPSNLTKTQGSQGESPNSVKSSVSSRQSDENVAKLDHNTTTEKQAPKRKMVKQVHTALPKVNAKIVAMPKNLNQSKKGETLNNKDSKQKMPPGQVISKTQPSSQRPLKHETSTVQKSMFHDVRDNNNKDSVSEQKPHKPLINLASEISDAEALQSSCRPDPQKPLNDQEKEKLALECQNISKLDKSLKHELESKQICLDKSETKFPNHKETDDCDAANICCHSVGSDNVNSKFYSTTALKYMVSNPNENSLNSNPVCDLDSTSAGQIHLISDRENQVGRKDTNKQSSIKCVEDVSLCNPERTNGTLNSAQEDKKSKVPVEGLTIPSKLSDESAMDEDKHATADSDVSSKCFSGQLSEKNSPKNMETSESPESHETPETPFVGHWNLSTGVLHQRESPESDTGSATTSSDDIKPRSEDYDAGGSQDDDGSNDRGISKCGTMLCHDFLGRSSSDTSTPEELKIYDSNLRIEVKMKKQSNNDLFQVNSTSDDEIPRKRPEIWSRSAIVHSRERENIPRGSVQFAQEIDQVSSSADETEDERSEAENVAENFSISNPAPQQFQGIINLAFEDATENECREFSATKKFKRSVLLSVDECEELGSDEGEVHTPFQASVDSFSPSDVFDGISHEHHGRTCYSRFSRESEDNILECKQNKGNSVCKNESTVLDLSSIDSSRKNKQSVSATEKKNTIDVLSSRSRQLLREDKKVNNGSNVENDIQQRSKFLDSDVKSQERPCHLDLHQREPNSDIPKNSSTKSLDSFRSQVLPQEGPVKESHSTTTEKANIALSAGDIDDCDTLAQTRMYDHRPSKTLSPIYEMDVIEAFEQKVESETHVTDMDFEDDQHFAKQDWTLLKQLLSEQDSNLDVTNSVPEDLSLAQYLINQTLLLARDSSKPQGITHIDTLNRWSELTSPLDSSASITMASFSSEDCSPQGEWTILELETQH

SEQ ID NO: 513 - protein, 1749 aa, Homo sapiens
MQAMDPAAADLYEEDGKDLDFYDFEPLPTLPEDEENVSLADILSLRDRGLSEQEAWAVCLECSLSMRSVAHAAIFQSLCITPDTLAFNTSGNVCFMEQLSDDPEGAFVPPEFDVTGNTFEAHIYSLGATLKAALEYVAEPTLEPRLSQDLEALLSRMQAEDPGDRPDLESIIALCEEKLQLTSSCRVCRSLSAVGRRVLSIESFGALQDVSESSWRERPAPGNAGPRRPPGDPSTDPEVLPTPEGPESETSRGPRASPTKALLSTPVRNGESHSREGLAGLVLDAERTLGELDRDALRRSRLRKVQTFPRLLSDSPEATLCLPLTRGKSQLPISELFSPDPRKAFLDRKNGLSSFQAQPKCRLWPEQEPEHQLGRVPCAGRSTDRGPGVPGSPGQPETSHPSQGPAEAPADPRDASGEAQTPRDDERIPEGARQLESAAAEQWVSLQDLLSQLGRPFREYELWALCLACLRALQTRPEHPAYLCLDSVLVAEDGAVLFQPPPANGSYDSFFLAPELAEERLVTEKASVYCVAAVLWTAAKFSVPRNHKLALPRRLKTLLLDMARRSAPERPSAAEAIKVCGSYLLQRGMDSRKILAHLRASICQVYQEEETISLQNAFSVVELKPSVAPAPEPSPGFLPVNSDTGLVAVPGPVPGQHPCGEEATQLPAAFTSEATHFKPIVLAQNASVARDQPALAQEESEERGGQREGEGEEKLSLEAHAGSPSLKTPDGPVPGPGPQGAAPEPLGASVQRDSAQGRPCPPPQAPANQPEGASSAAPGSPVPAPPTKASALPVEQGPAEPIPPGVASGGLRPDALGPTTAHHGPRHPPKPPRSKATERPGQEPEGPGATPAGERDDQSPDSVPERPRPADRRLCLPCVDASPLPGRTACPSLQEATRLIQEEFAFDGYLDNGLEALIMGEYIFALKDLTFATFCGAISEKFCDLYWDEKLLQNLFKVVNGQASPSPSTAEEAGSQLEGSQSPRSPSSKRPSLHRLGKEKPAMARTSSRAPCSPTSVSDVDSDALSRGNFEVGFRPQRSVKAERAQQPEAGEDRRPAGGASDVEAVTRLARSKGVGPALSPGPAGFQSCSPGWCSAFYEADCFGADVHNYVKDLGRQQADGALPDAQSPELEQQLMMEKRNYRKTLKFYQKLLQKEKRNKGSDVKTMLSKLKGQLEEMKSRVQFLSLVKKYLQVMYAERWGLEPCTLPVIVNIAAAPCDTLDFSPLDESSSLIFYNVNKHPGGRQKARILQAGTPLGLMAYLYSSDAFLEGYVQQFLYTFRYFCTPHDFLHFLLDRINSTLTRAHQDPTSTFTKIYRRSLCVLQAWVEDCYAVDFPRNSGLLGKLEDFISSKILPLDGSAKHLLGLLEVGMDRRAEGNPRGTDLENPREAEEDARPFNALCKRLSEDGISRKSFPWRLPRGNGLVLPPHKERPYTIAAALPKPCFLEDFYGPCAKTSEKGPYFLTEYSTHQLFSQLTLLQQELFQKCHPVHFLNSRALGVMDKSTAIPKASSSESLSAKTCSLFLPNYVQDKYLLQLLRNADDVSTWVAAEIVTSHTSKLQVNLLSKFLLIAKSCYEQRNFATAMQILSGLEHLAVRQSPAWRILPAKIAEVMEELKAVEVFLKSDSLCLMEGRRFRAQPTLPSAHLLAMHIQQLETGGFTMTNGAHRWSKLRNIAKVVSQVHAFQENPYTFSPDPKLQSYLKQRIARFSGADISTLAADSRANFHQVSSEKHSRKIQDKLRRMKATFQ

SEQ ID NO: 514 - protein, 2511 aa, Homo sapiens
MEEVVIAGMSGKLPESENLQEFWDNLIGGVDMVTDDDRRWKAGLYGLPRRSGKLKDLSRFDASFFGVHPKQAHTMDPQLRLLLEVTYEAIVDGGINPDSLRGTHTGVWVGVSGSETSEALSRDPETLVGYSMVGCQRAMMANRLSFFFDFRGPSIALDTACSSSLMALQNAYQAIHSGQCPAAIVGGINVLLKPNTSVQFLRLGMLSPEGTCKAFDTAGNGYCRSEGVVAVLLTKKSLARRVYATILNAGTNTDGFKEQGVTFPSGDIQEQLIRSLYQSAGVAPESFEYIEAHGTGTKVGDPQELNGITRALCATRQEPLLIGSTKSNMGHPEPASGLAALAKVLLSLEHGLWAPNLHFHSPNPEIPALLDGRLQVVDQPLPVRGGNVGINSFGFGGSNVHIILRPNTQPPPAPAPHATLPRLLRASGRTPEAVQKLLEQGLRHSQDLAFLSMLNDIAAVPATAMPFRGYAVLGGERGGPEVQQVPAGERPLWFICSGMGTQWRGMGLSLMRLDRFRDSILRSDEAVKPFGLKVSQLLLSTDESTFDDIVHSFVSLTAIQIGLIDLLSCMGLRPDGIVGHSLGEVACGYADGCLSQEEAVLAAYWRGQCIKEAHLPPGAMAAVGLSWEECKQRCPPGVVPACHNSKDTVTISGPQAPVFEFVEQLRKEGVFAKEVRTGGMAFHSYFMEAIAPPLLQELKKVIREPKPRSARWLSTSIPEAQWHSSLARTSSAEYNVNNLVSPVLFQEALWHVPEHAVVLEIAPHALLQAVLKRGLKPSCTIIPLMKKDHRDNLEFFLAGIGRLHLSGIDANPNALFPPVEFPAPRGTPLISPLIKWDHSLAWDVPAAEDFPNGSGSPSAAIYNIDTSSESPDHYLVDHTLDGRVLFPATGYLSIVWKTLARALGLGVEQLPVVFEDVVLHQATILPKTGTVSLEVRLLEASRAFEVSENGNLVVSGKVYQWDDPDPRLFDHPESPTPNPTEPLFLAQAEVYKELRLRGYDYGPHFQGILEASLEGDSGRLLWKDNWVSFMDTMLQMSILGSAKHGLYLPTRVTAIHIDPATHRQKLYTLQDKAQVADVVVSRWLRVTVAGGVHISGLHTESAPRRQQEQQVPILEKFCFTPHTEEGCLSERAALQEELQLCKGLVQALQTKVTQQGLKMVVPGLDGAQIPRDPSQQELPRLLSAACRLQLNGNLQLELAQVLAQERPKLPEDPLLSGLLDSPALKACLDTAVENMPSLKMKVVEVLAGHGHLYSRIPGLLSPHPLLQLSYTATDRHPQALEAAQAELQQHDVAQGQWDPADPAPSALGSADLLVCNCAVAALGDPASALSNMVAALREGGFLLLHTLLRGHPLGDIVAFLTSTEPQYGQGILSQDAWESLFSRVSLRLVGLKKSFYGSTLFLCRRPTPQDSPIFLPVDDTSFRWVESLKGILADEDSSRPVWLKAINCATSGVVGLVNCLRREPGGNRLRCVLLSNLSSTSHVPEVDPGSAELQKVLQGDLVMNVYRDGAWGAFRHFLLEEDKPEEPTAHAFVSTLTRGDLSSIRWVCSSLRHAQPTCPGAQLCTVYYASLNFRDIMLATGKLSPDAIPGKWTSQDSLLGMEFSGRDASGKRVMGLVPAKGLATSVLLSPDFLWDVPSNWTLEEAASVPVVYSTAYYALVVRGRVRPGETLLIHSGSGGVGQAAIAIALSLGCRVFTTVGSAEKRAYLQARFPQLDSTSFANSRDTSFEQHVLWHTGGKGVDLVLNSLAEEKLQASVRCLATHGRFLEIGKFDLSQNHPLGMAIFLKNVTFHGVLLDAFFNESSADWREVWALVQAGIRDGVVRPLKCTVFHGAQVEDAFRYMAQGKHIGKVVVQVLAEEPEAVLKGAKPKLMSAISKTFCPAHKSYIIAGGLGGFGLELAQWLIQRGVQKLVLTSRSGIRTGYQAKQVRRWRRQGVQVQVSTSNISSLEGARGLIAEAAQLGPVGGVFNLAVVLRDGLLENQTPEFFQDVCKPKYSGTLNLDRVTREACPELDYFVVFSSVSCGRGNAGQSNYGFANSAMERICEKRRHEGLPGLAVQWGAIGDVGILVETMSTNDTIVSGTLPQRMASCLEVLDLFLNQPHMVLSSFVLAEKAAAYRDRDSQRDLVEAVAHILGIRDLAAVNLDSSLADLGLDSLMSVEVRQTLERELNLVLSVREVRQLTLRKLQELSSKADEASELACPTPKEDGLAQQQTQLNLRSLLVNPEGPTLMRLNSVQSSERPLFLVHPIEGSTTVFHSLASRLSIPTYGLQCTRAAPLDSIHSLAAYYIDCIRQVQPEGPYRVAGYSYGACVAFEMCSQLQAQQSPAPTHNSLFLFDGSPTYVLAYTQSYRAKLTPGCEAEAETEAICFFVQQFTDMEHNRVLEALLPLKGLEERVAAAVDLIIKSHQGLDRQELSFAARSFYYKLRAAEQYTPKAKYHGNVMLLRAKTGGAYGEDLGADYNLSQVCDGKVSVHVIEGDHRTLLEGSGLESIISIIHSSLAEPRVSVREG

SEQ ID NO: 515 - protein, 2108 aa, Homo sapiens
MNSVAGNKERLAVSTRGKKYGVNEVCSPTKPAAPFSPESWYRKAYEESRAGSRPTPEGAGSALGSSGTPSPGSGTSSPSSFTGSPGPASPGIGTSSPGSLGGSPGFGTGSPGSGSGGGSSPGSDRGVWCENCNARLVELKRQALRLLLPGPFPGKDPAFSAVIHDKLQVPNTIRKAWNDRDNRCDICATHLNQLKQEAIQMVLTLEQAAGSEHYDASPCSPPPLSNIPTLVGSRHVGGLQQPRDWAFVPAPCATSNYTGFANKHGSKPSSLGVSNGAEKKSGSPTHQAKVSLQMATSPSNGNILNSVAIQAHQYLDGTWSLSRTNGVTLYPYQISQLMTESSREGLTEAVLNRYNADKPSACSVPASQGSCVASETSTGTSVAASFFARAAQKLNLSSKKKKHRPSTSSAAEPPLFATSFSGILQTSPPPAPPCLLRAVNKVKDTPGLGKVKVMLRICSTLARDTSESSSFLKVDPRKKQITLYDPLTCGGQNAFQKRGNQVPPKMFAFDAVFPQDASQAEVCAGTVAEVIQSVVNGADGCVFCFGHAKLGKSYTMIGKDDSMQNLGIIPCAISWLFKLINERKEKTGARFSVRVSAVEVWGKEENLRDLLSEVATGSLQDGQSPGVYLCEDPICGTQLQNQSELRAPTAEKAAFFLDAAIASRRSHQQDCDEDDHRNSHVFFTLHIYQYRMEKSGKGGMSGGRSRLHLIDLGSCVKALSKNREGGSGLCLSLSALGNVILALVNGSKHIPYKESKLAMLLRESLGNMNCRTTMIAHISAAVGSYAETLSTIQIASRVLRMKKKKTKYTSSSSGGESSCEEGRMRRPTQLRPFHTRATVDPDFPIAHLSSDPDYSSSSEQSCDTVIYIGPNGTALSDKELTDNEGPPDFVPIVPALQKTRGDSRPAEAGEAAAGKSERDCLKCNTFAELQERLDCIDGSEEPSSFPFEELPAQFGPEQASRGPRLSQAAGASPLSESDKEDNGSEGQLTNREGPELPASKMQRSHSPVPAAAPAHSPSPASPRSVPGSSSQHSASPLVQSPSLQSSRESLNSCGFVEGKPRPMGSPRLGIASLSKTSEYKPPSSPSQRCKVYTQKGVLPSPAPLPPSSKDSGVASRESLLQPEVRTPPVGMSPQVLKKSMSAGSEGFPETPVDDEQQAATPSESKKEILSTTMVTVQQPLELNGEDELVFTLVEELTISGVLDSGRPTSIISFNSDCSARALASGSRPVSIISSISEDLECYSSTAPVSEVSITQFLPLPKMSLDEKAQDAGSRRSSISSWLSEMSAGSEGEQSCHSFIAQTCFGHGEAMAEPVASEFVSSLQNTAVVCREKPKASPDNLLILSEMGDDSFNKAAPIKGCKISTVSKAMVTISNTANLSSCEGYIPMKTNITVYPCIAMSPRNIQEPEAPTATPKAGPTLAQSRESKENSAKKEMKFEDPWLKREEEVKKETAHPNEEGMMRCETATGPSNAETRAEQEQDGKPSPGDRLSSSSGEVSASPVTDNFRRVVDGCEMALPGLATQSPVHPNKSVKSSSLPRAFQKASRQEEPDSLSYYCAAETNGVGAASGTPPSKATLEGKVASPKHCVLARPKGTPPLPPVRKSSLDQKNRASPQHSASGSGTSSPLNQPAAFPAGLPDEPSGKTKDASSSSKLFSAKLEQLASRSNSLGRATVSHYECLSLERAESLSSVSSRLHAGKDGTMPRAGRSLGRSAGTSPPSSGASPKAGQSKISAVSRLLLASPRARGPSASTTKTLSFSTKSLPQAVGQGSSSPPGGKHTPWSTQSLSRNRSSGLASKLPLRAVSGRISELLQGGAGARGLQLRAGPEAEARGGALAEDEPAAAHLLPSPYSKITPPRRPHRCSSGHGSDNSSVLSGELPPAMGKTALFYHSGGSSGYESVMRDSEATGSASSAQDSTSENSSSVGGRCRSLKTPKKRSNPGSQRRRLIPALSLDTSSPVRKPPNSTGVRWVDGPLRSSPRGLGEPFEIKVYEIDDVERLQRRRGGASKEAMCFNAKLKILEHRQQRIAEVRAKYEWLMKELEATKQYLMLDPNKWLSEFDLEQVWELDSLEYLEALECVTERLESRVNFCKAHLMMITCFDITSRRR

SEQ ID NO: 516 - protein, 2058 aa, Homo sapiens
MDNFFTEGTRVWLRENGQHFPSTVNSCAEGIVVFRTDYGQVFTYKQSTITHQKVTAMHPTNEEGVDDMASLTELHGGSIMYNLFQRYKRNQIYTYIGSILASVNPYQPIAGLYEPATMEQYSRRHLGELPPHIFAIANECYRCLWKRHDNQCILISGESGAGKTESTKLILKFLSVISQQSLELSLKEKTSCVERAILESSPIMEAFGNAKTVYNNNSSRFGKFVQLNICQKGNIQGGRIVDYLLEKNRVVRQNPGERNYHIFYALLAGLEHEEREEFYLSTPENYHYLNQSGCVEDKTISDQESFREVITAMDVMQFSKEEVREVSRLLAGILHLGNIEFITAGGAQVSFKTALGRSAELLGLDPTQLTDALTQRSMFLRGEEILTPLNVQQAVDSRDSLAMALYACCFEWVIKKINSRIKGNEDFKSIGILDIFGFENFEVNHFEQFNINYANEKLQEYFNKHIFSLEQLEYSREGLVWEDIDWIDNGECLDLIEKKLGLLALINEESHFPQATDSTLLEKLHSQHANNHFYVKPRVAVNNFGVKHYAGEVQYDVRGILEKNRDTFRDDLLNLLRESRFDFIYDLFEHVSSRNNQDTLKCGSKHRRPTVSSQFKDSLHSLMATLSSSNPFFVRCIKPNMQKMPDQFDQAVVLNQLRYSGMLETVRIRKAGYAVRRPFQDFYKRYKVLMRNLALPEDVRGKCTSLLQLYDASNSEWQLGKTKVFLRESLEQKLEKRREEEVSHAAMVIRAHVLGFLARKQYRKVLYCVVIIQKNYRAFLLRRRFLHLKKAAIVFQKQLRGQIARRVYRQLLAEKREQEEKKKQEEEEKKKREEEERERERERREAELRAQQEEETRKQQELEALQKSQKEAELTRELEKQKENKQVEEILRLEKEIEDLQRMKEQQELSLTEASLQKLQERRDQELRRLEEEACRAAQEFLESLNFDEIDECVRNIERSLSVGSEFSSELAESACEEKPNFNFSQPYPEEEVDEGFEADDDAFKDSPNPSEHGHSDQRTSGIRTSDDSSEEDPYMNDTVVPTSPSADSTVLLAPSVQDSGSLHNSSSGESTYCMPQNAGDLPSPDGDYDYDQDDYEDGAITSGSSVTFSNSYGSQWSPDYRCSVGTYNSSGAYRFSSEGAQSSFEDSEEDFDSRFDTDDELSYRRDSVYSCVTLPYFHSFLYMKGGLMNSWKRRWCVLKDETFLWFRSKQEALKQGWLHKKGGGSSTLSRRNWKKRWFVLRQSKLMYFENDSEEKLKGTVEVRTAKEIIDNTTKENGIDIIMADRTFHLIAESPEDASQWFSVLSQVHASTDQEIQEMHDEQANPQNAVGTLDVGLIDSVCASDSPDRPNSFVIITANRVLHCNADTPEEMHHWITLLQRSKGDTRVEGQEFIVRGWLHKEVKNSPKMSSLKLKKRWFVLTHNSLDYYKSSEKNALKLGTLVLNSLCSVVPPDEKIFKETGYWNVTVYGRKHCYRLYTKLLNEATRWSSAIQNVTDTKAPIDTPTQQLIQDIKENCLNSDVVEQIYKRNPILRYTHHPLHSPLLPLPYGDINLNLLKDKGYTTLQDEAIKIFNSLQQLESMSDPIPIIQGILQTGHDLRPLRDELYCQLIKQTNKVPHPGSVGNLYSWQILTCLSCTFLPSRGILKYLKFHLKRIREQFPGSEMEKYALFTYESLKKTKCREFVPSRDEIEALIHRQEMTSTVYCHGGGSCKITINSHTTAGEVVEKLIRGLAMEDSRNMFALFEYNGHVDKAIESRTVVADVLAKFEKLAATSEVGDLPWKFYFKLYCFLDTDNVPKDSVEFAFMFEQAHEAVIHGHHPAPEENLQVLAALRLQYLQGDYTLHAAIPPLEEVYSLQRLKARISQSTKTFTPCERLEKRRTSFLEGTLRRSFRTGSVVRQKVEEEQMLDMWIKEEVSSARASIIDKWRKFQGMNQEQAMAKYMALIKEWPGYGSTLFDVECKEGGFPQELWLGVSADAVSVYKRGEGRPLEVFQYEHILSFGAPLANTYKIVVDERELLFETSEVVDVAKLMKAYISMIVKKRYSTTRSASSQGSSR

SEQ ID NO: 517 - protein, 1935 aa, Homo sapiens
MGDSEMAVFGAAAPYLRKSEKERLEAQTRPFDLKKDVFVPDDKQEFVKAKIVSREGGKVTAETEYGKTVTVKEDQVMQQNPPKFDKIEDMAMLTFLHEPAVLYNLKDRYGSWMIYTYSGLFCVTVNPYKWLPVYTPEVVAAYRGKKRSEAPPHIFSISDNAYQYMLTDRENQSILITGESGAGKTVNTKRVIQYFAVIAAIGDRSKKDQSPGKGTLEDQIIQANPALEAFGNAKTVRNDNSSRFGKFIRIHFGATGKLASADIETYLLEKSRVIFQLKAERDYHIFYQILSNKKPELLDMLLITNNPYDYAFISQGETTVASIDDAEELMATDNAFDVLGFTSEEKNSMYKLTGAIMHFGNMKFKLKQREEQAEPDGTEEADKSAYLMGLNSADLLKGLCHPRVKVGNEYVTKGQNVQQVIYATGALAKAVYERMFNWMVTRINATLETKQPRQYFIGVLDIAGFEIFDFNSFEQLCINFTNEKLQQFFNHHMFVLEQEEYKKEGIEWTFIDFGMDLQACIDLIEKPMGIMSILEEECMFPKATDMTFKAKLFDNHLGKSANFQKPRNIKGKPEAHFSLIHYAGIVDYNIIGWLQKNKDPLNETVVGLYQKSSLKLLSTLFANYAGADAPIEKGKGKAKKGSSFQTVSALHRENLNKLMTNLRSTHPHFVRCIIPNETKSPGVMDNPLVMHQLRCNGVLEGIRICRKGFPNRILYGDFRQRYRILNPAAIPEGQFIDSRKGAEKLLSSLDIDHNQYKFGHTKVFFKAGLLGLLEEMRDERLSRIITRIQAQSRGVLARMEYKKLLERRDSLLVIQWNIRAFMGVKNWPWMKLYFKIKPLLKSAEREKEMASMKEEFTRLKEALEKSEARRKELEEKMVSLLQEKNDLQLQVQAEQDNLADAEERCDQLIKNKIQLEAKVKEMNERLEDEEEMNAELTAKKRKLEDECSELKRDIDDLELTLAKVEKEKHATENKVKNLTEEMAGLDEIIAKLTKEKKALQEAHQQALDDLQAEEDKVNTLTKAKVKLEQQVDDLEGSLEQEKKVRMDLERAKRKLEGDLKLTQESIMDLENDKQQLDERLKKKDFELNALNARIEDEQALGSQLQKKLKELQARIEELEEELEAERTARAKVEKLRSDLSRELEEISERLEEAGGATSVQIEMNKKREAEFQKMRRDLEEATLQHEATAAALRKKHADSVAELGEQIDNLQRVKQKLEKEKSEFKLELDDVTSNMEQIIKAKANLEKMCRTLEDQMNEHRSKAEETQRSVNDLTSQRAKLQTENGELSRQLDEKEALISQLTRGKLTYTQQLEDLKRQLEEEVKAKNALAHALQSARHDCDLLREQYEEETEAKAELQRVLSKANSEVAQWRTKYETDAIQRTEELEEAKKKLAQRLQEAEEAVEAVNAKCSSLEKTKHRLQNEIEDLMVDVERSNAAAAALDKKQRNFDKILAEWKQKYEESQSELESSQKEARSLSTELFKLKNAYEESLEHLETFKRENKNLQEEISDLTEQLGSSGKTIHELEKVRKQLEAEKMELQSALEEAEASLEHEEGKILRAQLEFNQIKAEIERKLAEKDEEMEQAKRNHLRVVDSLQTSLDAETRSRNEALRVKKKMEGDLNEMEIQLSHANRMAAEAQKQVKSLQSLLKDTQIQLDDAVRANDDLKENIAIVERRNNLLQAELEELRAVVEQTERSRKLAEQELIETSERVQLLHSQNTSLINQKKKMDADLSQLQTEVEEAVQECRNAEEKAKKAITDAAMMAEELKKEQDTSAHLERMKKNMEQTIKDLQHRLDEAEQIALKGGKKQLQKLEARVRELENELEAEQKRNAESVKGMRKSERRIKELTYQTEEDRKNLLRLQDLVDKLQLKVKAYKRQAEEAEEQANTNLSKFRKVQHELDEAEERADIAESQVNKLRAKSRDIGTKGLNEE

SEQ ID NO: 518 - protein, 1359 aa, Homo sapiens
MYSVEDLLISHGYKLSRDPPASREDNPKGRQAARTGTRAGQGLQNGHEDGPAALAHRKTSAGKGHVSDSESRRSTPRGHGEPQSTSASRTSEAGFCNQPPSAWSSHPPTGNDQAYRRRGRQEARSQKPREHENLEARGMAQAHSLPVHVREGPWEVGGRSEHVMKKPVWEEELRMSGPAKWQNVSLESWNQPRKLGRQMSDGDGERLFQDLYPFIQGEHVLNSQNKGKSRSLPRVLSPESLSCTEIPIPLNERHSPKMPPYPPTCAPNLDSTRNSEKSGCSAPFPRPKFGRPLKPPSYSSHQQSRGGADSSDSQDSQQMDAYVPRHELCLSDPGLEPPVYVPPPSYRSPPQNIPNPYLEDTVPINVCGGHSQQQSPTEKAGASGQPPSGPPGTGNEYGVSPRLPQGLPAHPRPVTAYDGFVQYIPFDDPRLRHFKLAQPQGFCEDIKLDDKSYNSSPVTAQEPAHGGMQPDGAIWNPQSLIPPSGDERGLVLADSSPRWLWGQPPGDGENSGLPNQRDRCVARGQWPDVRGSQHGHTGRQVSSPYSQGESTCETQTKLKKFQTGTRTKKSSKKKMNETIFCLVSIPVKSESHLPDRDMDNNDLKPSADQKNGSDKSPALQEQSLLSMSSTDLELQALTGSMGGRTEFQKQDLGEPEEDRQTNDLSFIHLTKHRELKHSGSWPGHRYRDQQTQTSFSEEPQSSQLLPGAKLGGPSRAALSPKCSDPAASEAQTHTAFPTGDHKQRPSARNLKGHRSLSPSSNSAFSRTSLSVDQAPTPKAGRSQPCVDVHGLGAHPGPKREVVKGEPTGPCNSKQLFGQFLLKPVSRRPWDLISQLESFNKELQEEEESSSSSSSSSSSSEESEAEPQQENRAHCRQEDVGFRGNSPEMRVEPQPRMWVPESPVCRSGRGESKSESWSEELQPGHPRAWPPSPGRFRVEEGGGAPFCSADGSTSAEKRHLEVSNGMDELAGSPFPVTRMSSRSSDAKPLPASYPAEPREPQESPKITSAFSSVKPSEAVPRKFDSGGERGAGLPLSLSNKNRGLSAPDLRSVGLTPGQEQGASELEGSLGEASTIEIPPGESLQARAARILGIEVAVESLLPGIRRAGQNQPAEPDASACTPESPQEELLSRPAPADVPRVSTDAFYGRRKCGWTKSPLFVGDRDSARRAPQAFEHSDVDGVVTSTDPVPEPEPSPLESKFFEQKDVETKPPFRSTLFHFVERTPSVAGSEKRLRSPSKVIESLQEKLASPPRRADPDRLMRMKEVSSVSRMRVLSFRNADSQEDAEELKATTRGQAGLPGGLVSPGSGDRAQRLGHSLSVSKDSISREEKEHPAAQKEKSMDQDFWCPDSYDPSRVERV

SEQ ID NO: 519 - protein, 2093 aa, Homo sapiens
MLRLVVQSAKIDPPLAPLPRPCMSIDFRDIKKRTRVVEGNDPVWNETLIWHLWNRPLENDSFLQVTLQDMGSQKKERFIGLATVLLKPLLKQPSEVLFVKDLTLLNHSMKPTDCTVTLQVAHMSNQDIEKTGAEDHLGITAREAASQKLMVPGSTAHRALSSKPQHFQVRVKVFEARQLMGNNIKPVVKVSIAGQQHQTRIKMGNNPFFNEIFFQNFHEVPAKFFDETILIQTDIGFIYHSPGHTLLRKWLGLCQPNNPGSGVTGYLKVTIYALGVGDQALIDQKLLYGTDDTDIQIFKSAVVPINMAYLQLFIYCAEDLHLKKHQSVNPQLEVELIGEKLRTHMQTQTDNPIWNQILTFRIQLPCLSSYIKFRVLDCRKKDCPDEIGTASLSLNQISSTGEEIEGKQSLEPTSYTPRVYSGFLPCFGPSFLTLHGGKKAPFRIQEEGACIPDSVRDGLAYRGRVFLELITQIKSYQDSTIKDLSHEVTRIEKHQNRQKYGLCVIFLSCTMMPNFKELIHFEVSIGHYGNKMDLNYKPLVSSTPYSPVIYDGNIYHYVPWYNTKPVVAVTSNWEDVSFRMNCLNLLHFTRDRLKANLDTLKSTRNPKDPALLYQWEKLLRELAEDCKRPLPCMTYQPKATSLDRKRWQLRSLLLQELAQKAKQAKPKDMVATAEDWLYRLNTVLPEPQMGLPDVMIWLVAKEQRVAYAQVPAHSVLFSPAGALHSGRLCGKIQTLFLQYPEGEGQKDVLPAHLRVCMWLGNVTDSKDLQLLRQGDTAVYAEMYENQAKYKDQWGQQGLYHCPNFSDVMGNKTLPMTDFQPPLGWHWQDSWTVEPQRRLLLDIDINKSQVLEEVYENQGRDTRGAWGPAAIPNTDVNGQPMEARENVKCPQGWHFKKDWVVELNHAVDSWEYGVGIPPSGLPQVWSPVEKTYHSCRRRRWARVRFRNHGELSHEQETLSFLQLGLAKGEEEGWEYDTFGSKFHLNPQPQSRFRRRCWRRRLAPNKDKGIAPIFLLEGSLACEGGSVREEGDWAWARGNRSSTQEPQGRLSWVQAMDLKYHAGKEEDSKTWPWGLDRQFRDPQRQDTRPPNLPFIYCTFNKPHYYQLFCYIYQARNLVSNQILTFQGPFIRVVFLNHSQCTQTLRSSAGPTWAQTLIFQHLLLYENPQDTKESPPLVVLELWQRDFWGKESLWGRSVWPPMVWLDLQDRILPPMRWHPLVKELGKEEGEILASCELILQTEKLGEKQLPILSVPWKNGAYTLPKSIQPTIKRMAIEILAWGLRNMKKASSPQLLVEFGEESLRTEPIRDFQTNPNFPESESVLVLTVLMPTEEAYALPLVVKVVDNWAFGQQTVTGQANIDFLQPYFCDPWAQDYMHPKLPTLSEKKHQDFLGYLYRKFWFKSSKAEDEYEHEVDWWSKLFWATDEHKSLKYKYKDYHTLKVYECELEAVPAFQGLQDFCQTFKLYQEQPKLDSPVVGEFKGLFRIYPFPENPEAPKPPLQFLVWPEREDFPQPCLVRVYMVRAINLQPQDYNGLCDPYVILKLGKTELGNRDMYQPNTLDPIFGMMFELTCNIPLEKDLEIQLYDFDLFSPDDKIGTTVIDLENRLLSGFGAHCGLSKSYCQSGPFRWRDQMPPSYLLERYAKRKGLPPPLFSPEEDAVFYNGKKFKLQSFEPKTPTVHGLGPKKERLALYLLHTQGLVPEHVETRTLYSHSQPGIDQGKVQMWVDIFPKKLGPPGPQVNINPRKPKRKASEHSGHRYELRCIIWKTANVDLVDDNLSREKTSDIYIKGWLYGLEKDMQKTDIHYHSLTGEADFNWRFIFTMDYLAAERTCVQSQKDYIWSLDATSMKFPARLIIQVWDNDIFSPDDFLGVLELDLSDMPLPARHAKQCSIRMMDADPKWPYFIQYKHFSLFKKKTVTGWWPCQVLDGGKWRLSGKVKMSLEILSEKEALIKPAGRGQSEPNQYPTLHPPLRTNTSFTWLRSPVQNFCYIFWKRYRFKLIAFMVISIIALMLFNFIYSAPHYLAMSWIKPQLQLYPPIKIFNIINSLNTSNASSSILPTQDPNLKPTIDHEWKLHPGPTNHLSDIFPELPAPGD

SEQ ID NO: 520 - protein, 510 aa, Homo sapiens
MRPGLSFLLALLFFLGQAAGDLGDVGPPIPSPGFSSFPGVDSSSSFSSSSRSGSSSSRSLGSGGSVSQLFSNFTGSVDDRGTCQCSVSLPDTTFPVDRVERLEFTAHVLSQKFEKELSKVREYVQLISVYEKKLLNLTVRIDIMEKDTISYTELDFELIKVEVKEMEKLVIQLKESFGGSSEIVDQLEVEIRNMTLLVEKLETLDKNNVLAIRREIVALKTKLKECEASKDQNTPVVHPPPTPGSCGHGGVVNISKPSVVQLNWRGFSYLYGAWGRDYSPQHPNKGLYWVAPLNTDGRLLEYYRLYNTLDDLLLYINARELRITYGQGSGTAVYNNNMYVNMYNTGNIARVNLTTNTIAVTQTLPNAAYNNRFSYANVAWQDIDFAVDENGLWVIYSTEASTGNMVISKLNDTTLQVLNTWYTKQYKPSASNAFMVCGVLYATRTMNTRTEEIFYYYDTNTGKEGKLDIVMHKMQEKVQSINYNPFDQKLYVYNDGYLLNYDLSVLQKPQ

SEQ ID NO: 521 - protein, 2299 aa, Homo sapiens
MDFLIIFLLLFIGTSETQVDVSNVVPGTRYDITISSISTTYTSPVTRIVTTNVTKPGPPVFLAGERVGSAGILLSWNTPPNPNGRIISYIVKYKEVCPWMQTVYTQVRSKPDSLEVLLTNLNPGTTYEIKVAAENSAGIGVFSDPFLFQTAESAPGKVVNLTVEAYNASAVKLIWYLPRQPNGKITSFKISVKHARSGIVVKDVSIRVEDILTGKLPECNENSESFLWSTASPSPTLGRVTPPSRTTHSSSTLTQNEISSVWKEPISFVVTHLRPYTTYLFEVSAATTEAGYIDSTIVRTPESVPEGPPQNCVTGNITGKSFSILWDPPTIVTGKFSYRVELYGPSGRILDNSTKDLKFAFTNLTPFTMYDVYIAAETSAGTGPKSNISVFTPPDVPGAVFDLQLAEVESTQVRITWKKPRQPNGIINQYRVKVLVPETGIILENTLLTGNNEYINDPMAPEIVNIVEPMVGLYEGSAEMSSDLHSLATFIYNSHPDKNFPARNRAEDQTSPVVTTRNQYITDIAAEQLSYVIRRLVPFTEHMISVSAFTIMGEGPPTVLSVRTRQQVPSSIKIINYKNISSSSILLYWDPPEYPNGKITHYTIYAMELDTNRAFQITTIDNSFLITGLKKYTKYKMRVAASTHVGESSLSEENDIFVRTSEDEPESSPQDVEVIDVTADEIRLKWSPPEKPNGIIIAYEVLYKNIDTLYMKNTSTTDIILRNLRPHTLYNISVRSYTRFGHGNQVSSLLSVRTSETVPDSAPENITYKNISSGEIELSFLPPSSPNGIIQKYTIYLKRSNGNEERTINTTSLTQNIKVLKKYTQYIIEVSASTLKGEGVRSAPISILTEEDAPDSPPQDFSVKQLSGVTVKLSWQPPLEPNGIILYYTVYVWNRSSLKTINVTETSLELSDLDYNVEYSAYVTASTRFGDGKTRSNIISFQTPEGAPSDPPKDVYYANLSSSSIILFWTPPSKPNGIIQYYSVYYRNTSGTFMQNFTLHEVTNDFDNMTVSTIIDKLTIFSYYTFWLTASTSVGNGNKSSDIIEVYTDQDIPEGFVGNLTYESISSTAINVSWVPPAQPNGLVFYYVSLILQQTPRHVRPPLVTYERSIYFDNLEKYTDYILKITPSTEKGFSDTYTAQLYIKTEEDVPETSPIINTFKNLSSTSVLLSWDPPVKPNGAIISYDLTLQGPNENYSFITSDNYIILEELSPFTLYSFFAAARTRKGLGPSSILFFYTDESVPLAPPQNLTLINCTSDFVWLKWSPSPLPGGIVKVYSFKIHEHETDTIYYKNISGFKTEAKLVGLEPVSTYSIRVSAFTKVGNGNQFSNVVKFTTQESVPDVVQNMQCMATSWQSVLVKWDPPKKANGIITQYMVTVERNSTKVSPQDHMYTFIKLLANTSYVFKVRASTSAGEGDESTCHVSTLPETVPSVPTNIAFSDVQSTSATLTWIRPDTILGYFQNYKITTQLRAQKCKEWESEECVEYQKIQYLYEAHLTEETVYGLKKFRWYRFQVAASTNAGYGNASNWISTKTLPGPPDGPPENVHVVATSPFSISISWSEPAVITGPTCYLIDVKSVDNDEFNISFIKSNEENKTIEIKDLEIFTRYSVVITAFTGNISAAYVEGKSSAEMIVTTLESAPKDPPNNMTFQKIPDEVTKFQLTFLPPSQPNGNIQVYQALVYREDDPTAVQIHNLSIIQKTNTFVIAMLEGLKGGHTYNISVYAVNSAGAGPKVPMRITMDIKAPARPKTKPTPIYDATGKLLVTSTTITIRMPICYYSDDHGPIKNVQVLVTETGAQHDGNVTKWYDAYFNKARPYFTNEGFPNPPCTEGKTKFSGNEEIYIIGADNACMIPGNEDKICNGPLKPKKQYLFKFRATNIMGQFTDSDYSDPVKTLGEGLSERTVEIILSVTLCILSIILLGTAIFAFARIRQKQKEGGTYSPQDAEIIDTKLKLDQLITVADLELKDERLTRLLSYRKSIKPISKKSFLQHVEELCTNNNLKFQEEFSELPKFLQDLSSTDADLPWNRAKNRFPNIKPYNNNRVKLIADASVPGSDYINASYISGYLCPNEFIATQGPLPGTVGDFWRMVWETRAKTLVMLTQCFEKGRIRCHQYWPEDNKPVTVFGDIVITKLMEDVQIDWTIRDLKIERHGDCMTVRQCNFTAWPEHGVPENSAPLIHFVKLVRASRAHDTTPMIVHCSAGVGRTGVFIALDHLTQHINDHDFVDIYGLVAELRSERMCMVQNLAQYIFLHQCILDLLSNKGSNQPICFVNYSALQKMDSLDAMEGDVELEWEETTM

SEQ ID NO: 522 - protein, 1086 aa, Homo sapiens
MQEIHITKVLETITCHNTQFANLPSHRAPNPHLLIDVGGGKRSKGSSAGTAPPVTIPPAGWERAGTQTATPGPSQPYLGWGLPGHTPGHLQLNHPYHASPALSQPVDRAATTPTPRNEGRSQEPEGWEAKQGSPPTQGTHHAARRPFRRSESPRANPSRAHPSRDLRRWLRTAPDSPWGLGNKLGRRLRQSGPAWASLAPCVRPGGSCGSGLGSCSALGISRGSPTLGSGWERGDSLPSHSPARPTSDSQGTRQSSGPIETVQLKAAGLPELRPAHSGDGPSLGSCRWSSGGQENLERWPQWSPTTSANVNKTDRDGKGSSWAKWIHPTPEMIPDTWLCIDHDRVQSKTTRGAWDRSSLFRVLYLGTTDPRPATLSQTLLPCDLQVLGDAQPRCQGTLEAVKWCVCGVGHPLRRERAVKPAGPASPQSAPGSADLSPLWRSSAPGVSGRKMAAGPAAGTPSVSPRPCWAPCLDLPGQLCARSPEPAAGADRAASGIWRGLCFSLPPKLQFSSVCFVSSARRSPACVALRPAGIGRSTAKTPGPPGSLEMGALTFRDVAIEFSLEEWQCLDTEQQNLYRNVMLDNYRNLVFLGIAVSKPDLITCLEQEKEPWNLKTHDMVAKPPVICSHIAQDLWPEQGIKDYFQEVILRQYKKCRHENLLLRKGCKNVDEFKMHKKGYNRHNQCLTTSHSKIFQCDKYVKVFHKFSNSNRHKIRHTSKKPFKCKECGKLFCILSHLAQHKKIHTGEKSYKCEEYGKAFNESSNCTTHKRITEKKPYKCKECGKAFNWFSHFTTHKRIHTGEKPYQCEKCGKFFNQSTNLTTHKRIHTGEKPYKCEECGKAFNQSSNLTEHKKIHTKEQPYKCEKCGKAFKWSSTLTKHKRIHNGEKPYKCEECGKAFNRSSTLNRHKITHTGGKPYKYKECGKAFNQSSTLTIHKIIHTVEKFYKCEECGKAFSRISHLTTHKRIHTGEKPYKCEECGRAFNQSSTLTTHKRIHTGEKPYECEECGKAFNRSSTLTTHKIIHTEEKPYKCEECGKAFNQSSNLTKHKVIHTGEKPTNKLYKPESFNSAFDNTSNFSRCQRNAGEKF

SEQ ID NO: 523 - protein, 2248 aa, Homo sapiens
MKDKRKKKDRTWAEAARLALEKHPNSPMTAKQILEVIQKEGLKETSGTSPLACLNAMLHTNTRIGDGTFFKIPGKSGLYALKKEESSCPADGTLDLVCESELDGTDMAEANAHGEENGVCSKQVTDEASSTRDSSLTNTAVQSKLVSSFQQHTKKALKQALRQQQKRRNGVSMMVNKTVPRVVLTPLKVSDEQSDSPSGSESKNGEADSSDKEMKHGQKSPTGKQTSQHLKRLKKSGLGHLKWTKAEDIDIETPGSILVNTNLRALINKHTFASLPQHFQQYLLLLLPEVDRQMGSDGILRLSTSALNNEFFAYAAQGWKQRLAEGEFTPEMQLRIRQEIEKEKKTEPWKEKFFERFYGEKLGMSREESVKLTTGPNNAGAQSSSSCGTSGLPVSAQTALAEQQPKSMKSPASPEPGFCATLCPMVEIPPKDIMAELESEDILIPEESVIQEEIAEEVETSICECQDENHKTIPEFSEEAESLTNSHEEPQIAPPEDNLESCVMMNDVLETLPHIEVKIEGKSESPQEEMTVVIDQLEVCDSLIPSTSSMTHVSDTEHKESETAVETSTPKIKTGSSSLEGQFPNEGIAIDMELQSDPEEQLSENACISETSFSSESPEGACTSLPSPGGETQSTSEESCTPASLETTFCSEVSSTENTDKYNQRNSTDENFHASLMSEISPISTSPEISEASLMSNLPLTSEASPVSNLPLTSETSPMSDLPLTSETSSVSSMLLTSETTFVSSLPLPSETSPISNSSINERMAHQQRKSPSVSEEPLSPQKDESSATAKPLGENLTSQQKNLSNTPEPIIMSSSSIAPEAFPSEDLHNKTLSQQTCKSHVDTEKPYPASIPELASTEMIKVKNHSVLQRTEKKVLPSPLELSVFSEGTDNKGNELPSAKLQDKQYISSVDKAPFSEGSRNKTHKQGSTQSRLETSHTSKSSEPSKSPDGIRNESRDSEISKRKTAEQHSFGICKEKRARIEDDQSTRNISSSSPPEKEQPPREEPRVPPLKIQLSKIGPPFIIKSQPVSKPESRASTSTSVSGGRNTGARTLADIKARAQQARAQREAAAAAAVAAAASIVSGAMGSPGEGGKTRTLAHIKEQTKAKLFAKHQARAHLFQTSKETRLPPPLSSKEGPPNLEVSSTPETKMEGSTGVIIVNPNCRSPSNKSAHLRETTTVLQQSLNPSKLPETATDLSVHSSDENIPVSHLSEKIVSSTSSENSSVPMLFNKNSVPVSVCSTAISGAIKEHPFVSSVDKSSVLMSVDSANTTISACNISMLKTIQGTDTPCIAIIPKCIESTPISATTEGSSISSSMDDKQLLISSSSASNLVSTQYTSVPTPSIGNNLPNLSTSSVLIPPMGINNRFPSEKIAIPGSEEQATVSMGTTVRAALSCSDSVAVTDSLVAHPTVAMFTGNMLTINSYDSPPKLSAESLDKNSGPRNRADNSGKPQQPPGGFAPAAINRSIPCKVIVDHSTTLTSSLSLTVSVESSEASLDLQGRPVRTEASVQPVACPQVSVISRPEPVANEGIDHSSTFIAASAAKQDSKTLPATCTSLRELPLVPDKLNEPTAPSHNFAEQARGPAPFKSEADTTCSNQYNPSNRICWNDDGMRSTGQPLVTHSGSSKQKEYLEQSCPKAIKTEHANYLNVSELHPRNLVTNVALPVKSELHEADKGFRMDTEDFPGPELPPPAAEGASSVQQTQNMKASTSSPMEEAISLATDALKRVPGAGSSGCRLSSVEANNPLVTQLLQGNLPLEKVLPQPRLGAKLEINRLPLPLQTTSVGKTAPERNVEIPPSSPNPDGKGYLAGTLAPLQMRKRENHPKKRVARTVGEHTQVKCEPGKLLVEPDVKGVPCVISSGISQLGHSQPFKQEWLNKHSMQNRIVHSPEVKQQKRLLPSCSFQQNLFHVDKNGGFHTDAGTSHRQQFYQMPVAARGPIPTAALLQASSKTPVGCNAFAFNRHLEQKGLGEVSLSSAPHQLRLANMLSPNMPMKEGDEVGGTAHTMPNKALVHPPPPPPPPPPPPLALPPPPPPPPPLPPPLPNAEVPSDQKQPPVTMETTKRLSWPQSTGICSNIKSEPLSFEEGLSSSCELGMKQVSYDQNEMKEQLKAFALKSADFSSYLLSEPQKPFTQLAAQKMQVQQQQQLCGNYPTIHFGSTSFKRAASAIEKSIGILGSGSNPATGLSGQNAQMPVQNFADSSNADELELKCSCRLKAMIVCKGCGAFCHDDCIGPSKLCVACLVVR

SEQ ID NO: 524 - protein, 1393 aa, Homo sapiens
MACSIVQFCYFQDLQAARDFLFPHLREEILSGALRRDPSKSTDWEDDGWGAWEENEPQEPEEEGNTCKTQKTSWLQDCVLSLSPTNDLMVIAREQKAVFLVPKWKYSDKGKEEMQFAVGWSGSLNVEEGECVTSALCIPLASQKRSSTGRPDWTCIVVGFTSGYVRFYTENGVLLLAQLLNEDPVLQLKCRTYEIPRHPGVTEQNEELSILYPAAIVTIDGFSLFQSLRACRNQVAKAAASGNENIQPPPLAYKKWGLQDIDTIIDHASVGIMTLSPFDQMKTASNIGGFNAAIKNSPPAMSQYITVGSNPFTGFFYALEGSTQPLLSHVALAVASKLTSALFNAASGWLGWKSKHEEEAVQKQKPKVEPATPLAVRFGLPDSRRHGESICLSPCNTLAAVTDDFGRVILLDVARGIAIRMWKGYRDAQIGWIQTVEDLHERVPEKADFSPFGNSQGPSRVAQFLVIYAPRRGILEVWSTQQGPRVGAFNVGKHCRLLYPGYKIMGLNNVTSQSWQPQTYQICLVDPVSGSVKTVNVPFHLALSDKKSERAKDMHLVKKLAALLKTKSPNLDLVETEIKELILDIKYPATKKQALESILASERLPFSCLRNITQTLMDTLKSQELESVDEGLLQFCANKLKLLQLYESVSQLNSLDFHLDTPFSDNDLALLLRLDEKELLKLQALLEKYKQENTRTNVRFSDDKDGVLPVKTFLEYLEYEKDVLNIKKISEEEYVALGSFFFWKCLHGESSTEDMCHTLESAGLSPQLLLSLLLSVWLSKEKDILDKPQSICCLHTMLSLLSKMKVAIDETWDSQSVSPWWQQMRTACIQSENNGAALLSAHVGHSVAAQISNNMTEKKFSQTVLGADSEALTDSWEALSLDTEYWKLLLKQLEDCLILQTLLHSKGNTQTSKVSSLQAEPLPRLSVKKLLEGGKGGIADSVAKWIFKQDFSPEVLKLANEERDAENPDEPKEGVNRSFLEVSEMEMDLGAIPDLLHLAYEQFPCSLELDVLHAHCCWEYVVQWNKDPEEARFFVRSIEHLKQIFNAHVQNGIALMMWNTFLVKRFSAATYLMDKVGKSPKDRLCRRDVGMSDTAMTSFLGSCLDLLQILMEADVSRDEIQVPVLDTEDAWLSVEGPISIVELALEQKHIHYPLVEHHSILCSILYAVMRFSLKTVKPLSLFDSKGKNAFFKDLTSIQLLPSGEMDPNFISVRQQFLLKVVSAAVQAQHSATKVKDPTEEATPTPFGKDQDWPALAVDLAHHLQVSEDVVRRHYVGELYNYGVDHLGEEAILQVHDKEVLASQLLVLTGQRLAHALLHTQTKEGMELLARLPPTLCTWLKAMDPQDLQNTEVPIATTAKLVNKVIELLPEKHGQYGLALHLIEAVEAISLPSL

SEQ ID NO: 525 - protein, 2371 aa, Homo sapiens
MAAPESGPALSPGTAEGEEETILYDLLVNTEWPPETEVQPRGNQKHGASFIITKAIRDRLLFLRQYIWYSPAPFLLPDGLVRLVNKQINWHLVLASNGKLLAAVQDQCVEIRSAKDDFTSIIGKCQVPKDPKPQWRRVAWSYDCTLLAYAESTGTVRVFDLMGSELFVISPASSFIGDLSYAIAGLIFLEYKASAQWSAELLVINYRGELRSYLVSVGTNQSYQESHCFSFSSHYPHGINTAIYHPGHRLLLVGGCETAEVGMSKASSCGLSAWRVLSGSPYYKQVTNGGDGVTAVPKTLGLLRMLSVKFYSRQGQEQDGIFKMSLSPDGMLLAAIHFSGKLSIWAIPSLKQQGEWGQNEQPGYDDLNPDWRLSTEKRKKIKDKESFYPLIDVNWWADSAVTLARCSGALTVSSVKTLKNLLGKSCEWFEPSPQVTATHDGGFLSLECEIKLAPKRSRLETRAGEEDEGEEDSDSDYEISAKARYFGYIKQGLYLVTEMERFAPPRKRPRTITKNYRLVSLRSTTPEELYQRKIESEEYEEALSLAHTYGLDTDLVYQRQWRKSAVNVASIQNYLSKIKKRSWVLHECLERVPENVDAAKELLQYGLKGTDLEALLAIGKGADDGRFTLPGEIDIDSISYEELSPPDEEPAKNKKEKELKKRQELLKLVNFSKLTLEQKELCRCRRKLLTYLDRLATYEEILGVPHASEQRYDAEFFKKFRNQNIVLSARTYAQESNVQALEILFTYHGSDLLPHRLAILSNFPETTSPHEYSVLLPEACFNGDSLMIIPWHEHKHRAKDWCEELACRMVVEPNLQDESEFLYAAQPELLRFRMTQLTVEKVMDWYQTRAEEIEHYARQVDCALSLIRLGMERNIPGLLVLCDNLVTLETLVYEARCDVTLTLKELQQMKDIEKLRLLMNSCSEDKYVTSAYQWMVPFLHRCEKQSPGVANELLKEYLVTLAKGDLKFPLKIFQHSKPDLQQKIIPDQDQLMAIALECIYTCERNDQLCLCYDLLECLPERGYGDKTEATTKLHDMVDQLEQILSVSELLEKHGLEKPISFVKNTQSSSEEARKLMVRLTRHTGRKQPPVSESHWRTLLQDMLTMQQNVYTCLDSDACYEIFTESLLCSSRLENIHLAGQMMHCSACSENPPAGIAHKGKPHYRVSYEKSIDLVLAASREYFNSSTNLTDSCMDLARCCLQLITDRPPAIQEELDLIQAVGCLEEFGVKILPLQVRLCPDRISLIKECISQSPTCYKQSTKLLGLAELLRVAGENPEERRGQVLILLVEQALRFHDYKAASMHCQELMATGYPKSWDVCSQLGQSEGYQDLATRQELMAFALTHCPPSSIELLLAASSSLQTEILYQRVNFQIHHEGGENISASPLTSKAVQEDEVGVPGSNSADLLRWTTATTMKVLSNTTTTTKAVLQAVSDGQWWKKSLTYLRPLQGQKCGGAYQIGTTANEDLEKQGCHPFYESVISNPFVAESEGTYDTYQHVPVESFAEVLLRTGKLAEAKNKGEVFPTTEVLLQLASEALPNDMTLALAYLLALPQVLDANRCFEKQSPSALSLQLAAYYYSLQIYARLAPCFRDKCHPLYRADPKELIKMVTRHVTRHEHEAWPEDLISLTKQLHCYNERLLDFTQAQILQGLRKGVDVQRFTADDQYKRETILGLAETLEESVYSIAISLAQRYSVSRWEVFMTHLEFLFTDSGLSTLEIENRAQDLHLFETLKTDPEAFHQHMVKYIYPTIGGFDHERLQYYFTLLENCGCADLGNCAIKPETHIRLLKKFKVVASGLNYKKLTDENMSPLEALEPVLSSQNILSISKLVPKIPEKDGQMLSPSSLYTIWLQKLFWTGDPHLIKQVPGSSPEWLHAYDVCMKYFDRLHPGDLITVVDAVTFSPKAVTKLSVEARKEMTRKAIKTVKHFIEKPRKRNSEDEAQEAKDSKVTYADTLNHLEKSLAHLETLSHSFILSLKNSEQETLQKYSHLYDLSRSEKEKLHDEAVAICLDGQPLAMIQQLLEVAVGPLDISPKDIVQSAIMKIISALSGGSADLGGPRDPLKVLEGVVAAVHASVDKGEELVSPEDLLEWLRPFCADDAWPVRPRIHVLQILGQSFHLTEEDSKLLVFFRTEAILKASWPQRQVDIADIENEENRYCLFMELLESSHHEAEFQHLVLLLQAWPPMKSEYVITNNPWVRLATVMLTRCTMENKEGLGNEVLKMCRSLYNTKQMLPAEGVKELCLLLLNQSLLLPSLKLLLESRDEHLHEMALEQITAVTTVNDSNCDQELLSLLLDAKLLVKCVSTPFYPRIVDHLLASLQQGRWDAEELGRHLREAGHEAEAGSLLLAVRGTHQAFRTFSTALRAAQHWV

SEQ ID NO: 526 - protein, 1744 aa, Homo sapiens
MRLLWGLIWASSFFTLSLQKPRLLLFSPSVVHLGVPLSVGVQLQDVPRGQVVKGSVFLRNPSRNNVPCSPKVDFTLSSERDFALLSLQVPLKDAKSCGLHQLLRGPEVQLVAHSPWLKDSLSRTTNIQGINLLFSSRRGHLFLQTDQPIYNPGQRVRYRVFALDQKMRPSTDTITVMVENSHGLRVRKKEVYMPSSIFQDDFVIPDISEPGTWKISARFSDGLESNSSTQFEVKKYVLPNFEVKITPGKPYILTVPGHLDEMQLDIQARYIYGKPVQGVAYVRFGLLDEDGKKTFFRGLESQTKLVNGQSHISLSKAEFQDALEKLNMGITDLQGLRLYVAAAIIESPGGEMEEAELTSWYFVSSPFSLDLSKTKRHLVPGAPFLLQALVREMSGSPASGIPVKVSATVSSPGSVPEVQDIQQNTDGSGQVSIPIIIPQTISELQLSVSAGSPHPAIARLTVAAPPSGGPGFLSIERPDSRPPRVGDTLNLNLRAVGSGATFSHYYYMILSRGQIVFMNREPKRTLTSVSVFVDHHLAPSFYFVAFYYHGDHPVANSLRVDVQAGACEGKLELSVDGAKQYRNGESVKLHLETDSLALVALGALDTALYAAGSKSHKPLNMGKVFEAMNSYDLGCGPGGGDSALQVFQAAGLAFSDGDQWTLSRKRLSCPKEKTTRKKRNVNFQKAINEKLGQYASPTAKRCCQDGVTRLPMMRSCEQRAARVQQPDCREPFLSCCQFAESLRKKSRDKGQAGLQRALEILQEEDLIDEDDIPVRSFFPENWLWRVETVDRFQILTLWLPDSLTTWEIHGLSLSKTKGLCVATPVQLRVFREFHLHLRLPMSVRRFEQLELRPVLYNYLDKNLTVSVHVSPVEGLCLAGGGGLAQQVLVPAGSARPVAFSVVPTAATAVSLKVVARGSFEFPVGDAVSKVLQIEKEGAIHREELVYELNPLDHRGRTLEIPGNSDPNMIPDGDFNSYVRVTASDPLDTLGSEGALSPGGVASLLRLPRGCGEQTMIYLAPTLAASRYLDKTEQWSTLPPETKDHAVDLIQKGYMRIQQFRKADGSYAAWLSRGSSTWLTAFVLKVLSLAQEQVGGSPEKLQETSNWLLSQQQADGSFQDLSPVIHRSMQGGLVGNDETVALTAFVTIALHHGLAVFQDEGAEPLKQRVEASISKASSFLGEKASAGLLGAHAAAITAYALTLTKAPADLRGVAHNNLMAMAQETGDNLYWGSVTGSQSNAVSPTPAPRNPSDPMPQAPALWIETTAYALLHLLLHEGKAEMADQAAAWLTRQGSFQGGFRSTQDTVIALDALSAYWIASHTTEERGLNVTLSSTGRNGFKSHALQLNNRQIRGLEEELQFSLGSKINVKVGGNSKGTLKVLRTYNVLDMKNTTCQDLQIEVTVKGHVEYTMEANEDYEDYEYDELPAKDDPDAPLQPVTPLQLFEGRRNRRRREAPKVVEEQESRVHYTVCIWRNGKVGLSGMAIADVTLLSGFHALRADLEKLTSLSDRYVSHFETEGPHVLLYFDSVPTSRECVGFEAVQEVPVGLVQPASATLYDYYNPERRCSVFYGAPSKSRLLATLCSAEVCQCAEGKCPRQRRALERGLQDEDGYRMKFACYYPRVEYGFQVKVLREDSRAAFRLFETKITQVLHFTKDVKAAANQMRNFLVRASCRLRLEPGKEYLIMGLDGATYDLEGHPQYLLDSNSWIEEMPSERLCRSTRQRAACAQLNDFLQEYGTQGCQV

SEQ ID NO: 527 - protein, 1755 aa, Homo sapiens
MLSATPLYGNVHSWMNSERVRMCGASEDRKILVNDGDASKARLELREENPLNHNVVDASTAHRIDGLAALSMDRTGLIREGLRVPGNIVYSSLCGLGSEKGREAATSTLGGLGFSSERNPEMQFKPNTPETVEASAVSGKPPNGFSAIYKTPPGIQKSAVATAEALGLDRPASDKQSPLNINGASYLRLPWVNPYMEGATPAIYPFLDSPNKYSLNMYKALLPQQSYSLAQPLYSPVCTNGERFLYLPPPHYVGPHIPSSLASPMRLSTPSASPAIPPLVHCADKSLPWKMGVSPGNPVDSHAYPHIQNSKQPRVPSAKAVTSGLPGDTALLLPPSPRPSPRVHLPTQPAADTYSEFHKHYARISTSPSVALSKPYMTVSSEFPAARLSNGKYPKAPEGGEGAQPVPGHARKTAVQDRKDGSSPPLLEKQTVTKDVTDKPLDLSSKVVDVDASKADHMKKMAPTVLVHSRAGSGLVLSGSEIPKETLSPPGNGCAIYRSEIISTAPSSWVVPGPSPNEENNGKSMSLKNKALDWAIPQQRSSSCPRMGGTDAVITNVSGSVSSAGRPASASPAPNANADGTKTSRSSVETTPSVIQHVGQPPATPAKHSSSTSSKGAKASNPEPSFKANENGLPPSSIFLSPNEAFRSPPIPYPRSYLPYPAPEGIAVSPLSLHGKGPVYPHPVLLPNGSLFPGHLAPKPGLPYGLPTGRPEFVTYQDALGLGMVHPMLIPHTPIEITKEEKPERRSRSHERARYEDPTLRNRFSEILETSSTKLHPDVPTDKNLKPNPNWNQGKTVVKSDKLVYVDLLREEPDAKTDTNVSKPSFAAESVGQSAEPPKPSVEPALQQHRDFIALREELGRISDFHETYTFKQPVFTVSKDSVLAGTNKENLGLPVSTPFLEPPLGSDGPAVTFGKTQEDPKPFCVGSAPPSVDVTPTYTKDGADEAESNDGKVLKPKPSKLAKRIANSAGYVGDRFKCVTTELYADSSQLSREQRALQMEGLQEDSILCLPAAYCERAMMRFSELEMKEREGGHPATKDSEMCKFSPADWERLKGNQDKKPKSVTLEEAIAEQNESERCEYSVGNKHRDPFEAPEDKDLPVEKYFVERQPVSEPPADQVASDMPHSPTLRVDRKRKVSGDSSHTETTAEEVPEDPLLKAKRRRVSKDDWPEREMTNSSSNHLEDPHYSELTNLKVCIELTGLHPKKQRHLLHLRERWEQQVSAADGKPGRQSRKEVTQATQPEAIPQGTNITEEKPGRKRAEAKGNRSWSEESLKPSDNEQGLPVFSGSPPMKSLSSTSAGGKKQAQPSCAPASRPPAKQQKIKENQKTDVLCADEEEDCQAASLLQKYTDNSEKPSGKRLCKTKHLIPQESRRGLPLTGEYYVENADGKVTVRRFRKRPEPSSDYDLSPAKQEPKPFDRLQQLLPASQSTQLPCSSSPQETTQSRPMPPEARRLIVNKNAGETLLQRAARLGYEEVVLYCLENKICDVNHRDNAGYCALHEACARGWLNIVRHLLEYGADVNCSAQDGTRPLHDAVENDHLEIVRLLLSYGADPTLATYSGRTIMKMTHSELMEKFLTDYLNDLQGRNDDDASGTWDFYGSSVCEPDDESGYDVLANPPGPEDQDDDDDAYSDVFEFEFSETPLLPCYNIQVSVAQGPRNWLLLSDVLKKLKMSSRIFRCNFPNVEIVTIAEAEFYRQVSASLLFSCSKDLEAFNPESKELLDLVEFTNEIQTLLGSSVEWLHPSDLASDNYW

SEQ ID NO: 528 - protein, 316 aa, Homo sapiens
MATFVELSTKAKMPIVGLGTWKSPLGKVKEAVKVAIDAGYRHIDCAYVYQNEHEVGEAIQEKIQEKAVKREDLFIVSKLWPTFFERPLVRKAFEKTLKDLKLSYLDVYLIHWPQGFKSGDDLFPKDDKGNAIGGKATFLDAWEAMEELVDEGLVKALGVSNFSHFQIEKLLNKPGLKYKPVTNQVECHPYLTQEKLIQYCHSKGITVTAYSPLGSPDRPWAKPEDPSLLEDPKIKEIAAKHKKTAAQVLIRFHIQRNVIVIPKSVTPARIVENIQVFDFKLSDEEMATILSFNRNWRACNVLQSSHLEDYPFNAEY

SEQ ID NO: 529 - protein, 1690 aa, Homo sapiens
MHPGLWLLLVTLCLTEELAAAGEKSYGKPCGGQDCSGSCQCFPEKGARGRPGPIGIQGPTGPQGFTGSTGLSGLKGERGFPGLLGPYGPKGDKGPMGVPGFLGINGIPGHPGQPGPRGPPGLDGCNGTQGAVGFPGPDGYPGLLGPPGLPGQKGSKGDPVLAPGSFKGMKGDPGLPGLDGITGPQGAPGFPGAVGPAGPPGLQGPPGPPGPLGPDGNMGLGFQGEKGVKGDVGLPGPAGPPPSTGELEFMGFPKGKKGSKGEPGPKGFPGISGPPGFPGLGTTGEKGEKGEKGIPGLPGPRGPMGSEGVQGPPGQQGKKGTLGFPGLNGFQGIEGQKGDIGLPGPDVFIDIDGAVISGNPGDPGVPGLPGLKGDEGIQGLRGPSGVPGLPALSGVPGALGPQGFPGLKGDQGNPGRTTIGAAGLPGRDGLPGPPGPPGPPSPEFETETLHNKESGFPGLRGEQGPKGNLGLKGIKGDSGFCACDGGVPNTGPPGEPGPPGPWGLIGLPGLKGARGDRGSGGAQGPAGAPGLVGPLGPSGPKGKKGEPILSTIQGMPGDRGDSGSQGFRGVIGEPGKDGVPGLPGLPGLPGDGGQGFPGEKGLPGLPGEKGHPGPPGLPGNGLPGLPGPRGLPGDKGKDGLPGQQGLPGSKGITLPCIIPGSYGPSGFPGTPGFPGPKGSRGLPGTPGQPGSSGSKGEPGSPGLVHLPELPGFPGPRGEKGLPGFPGLPGKDGLPGMIGSPGLPGSKGATGDIFGAENGAPGEQGLQGLTGHKGFLGDSGLPGLKGVHGKPGLLGPKGERGSPGTPGQVGQPGTPGSSGPYGIKGKSGLPGAPGFPGISGHPGKKGTRGKKGPPGSIVKKGLPGLKGLPGNPGLVGLKGSPGSPGVAGLPALSGPKGEKGSVGFVGFPGIPGLPGIPGTRGLKGIPGSTGKMGPSGRAGTPGEKGDRGNPGPVGIPSPRRPMSNLWLKGDKGSQGSAGSNGFPGPRGDKGEAGRPGPPGLPGAPGLPGIIKGVSGKPGPPGFMGIRGLPGLKGSSGITGFPGMPGESGSQGIRGSPGLPGASGLPGLKGDNGQTVEISGSPGPKGQPGESGFKGTKGRDGLIGNIGFPGNKGEDGKVGVSGDVGLPGAPGFPGVAGMRGEPGLPGSSGHQGAIGPLGSPGLIGPKGFPGFPGLHGLNGLPGTKGTHGTPGPSITGVPGPAGLPGPKGEKGYPGIGIGAPGKPGLRGQKGDRGFPGLQGPAGLPGAPGISLPSLIAGQPGDPGRPGLDGERGRPGPAGPPGPPGPSSNQGDTGDPGFPGIPGPKGPKGDQGIPGFSGLPGELGLKGMRGEPGFMGTPGKVGPPGDPGFPGMKGKAGPRGSSGLQGDPGQTPTAEAVQVPPGPLGLPGIDGIPGLTGDPGAQGPVGLQGSKGLPGIPGKDGPSGLPGPPGALGDPGLPGLQGPPGFEGAPGQQGPFGMPGMPGQSMRVGYTLVKHSQSEQVPPCPIGMSQLWVGYSLLFVEGQEKAHNQDLGFAGSCLPRFSTMPFIYCNINEVCHYARRNDKSYWLSTTAPIPMMPVSQTQIPQYISRCSVCEAPSQAIAVHSQDITIPQCPLGWRSLWIGYSFLMHTAAGAEGGGQSLVSPGSCLEDFRATPFIECSGARGTCHYFANKYSFWLTTVEERQQFGELPVSETLKAGQLHTRVSRCQVCMKSL

SEQ ID NO: 530 - protein, 1555 aa, Homo sapiens
MSEQTPAEAGAAGAREDACRDYQSSLEDLTFNSKPHINMLTILAEENLPFAKEIVSLIEAQTAKAPSSEKLPVMYLMDSIVKNVGREYLTAFTKNLVATFICVFEKVDENTRKSLFKLRSTWDEIFPLKKLYALDVRVNSLDPAWPIKPLPPNVNTSSIHVNPKFLNKSPEEPSTPGTVVSSPSISTPPIVPDIQKNLTQEQLIRQQLLAKQKQLLELQQKKLELELEQAKAQLAVSLSVQQETSNLGPGSAPSKLHVSQIPPMAVKAPHQVPVQSEKSRPGPSLQIQDLKGTNRDPRLNRISQHSHGKDQSHRKEFLMNTLNQSDTKTSKTIPSEKLNSSKQEKSKSGEKITKKELDQLDSKSKSKSKSPSPLKNKLSHTKDLKNQESESMRLSDMNKRDPRLKKHLQDKTDGKDDDVKEKRKTAEKKDKDEHMKSSEHRLAGSRNKIINGIVQKQDTITEESEKQGTKPGRSSTRKRSRSRSPKSRSPIIHSPKRRDRRSPKRRQRSMSPTSTPKAGKIRQSGAKQSHMEEFTPPSREDRNAKRSTKQDIRDPRRMKKTEEERPQETTNQHSTKSGTEPKENVENWQSSKSAKRWKSGWEENKSLQQVDEHSKPPHLRHRESWSSTKGILSPRAPKQQQHRLSVDANLQIPKELTLASKRELLQKTSERLASGEITQDDFLVVVHQIRQLFQYQEGVREEQRSPFNDRFPLKRPRYEDSDKPFVDSPASRFAGLDTNQRLTALAEDRPLFDGPSRPSVARDGPTKMIFEGPNKLSPRIDGPPTPASLRFDGSPGQMGGGGPLRFEGPQGQLGGGCPLRFEGPPGPVGTPLRFEGPIGQAGGGGFRFEGSPGLRFEGSPGGLRFEGPGGQPVGGLRFEGHRGQPVGGLRFEGPHGQPVGGLRFDNPRGQPVGGLRFEGGHGPSGAAIRFDGPHGQPGGGIRFEGPLLQQGVGMRFEGPHGQSVAGLRFEGQHNQLGGNLRFEGPHGQPGVGIRFEGPLVQQGGGMRFEGPSVPGGGLRIEGPLGQGGPRFEGCHALRFDGQPGQPSLLPRFDGLHGQPGPRFERTPGQPGPQRFDGPPGQQVQPRFDGVPQRFDGPQHQQASRFDIPLGLQGTRFDNHPSQRLESVSFNQTGPYNDPPGNAFNAPSQGLQFQRHEQIFDSPQGPNFNGPHGPGNQSFSNPLNRASGHYFDEKNLQSSQFGNFGNIPAPMTVGNIQASQQVLSGVAQPVAFGQGQQFLPVHPQNPGFVQNPSGALPKAYPDNHLSQVDVNELFSKLLKTGILKLSQTDSATTQVSEVTAQPPPEEEEDQNEDQDVPDLTNFTVEELKQRYDSVINRLYTGIQCYSCGMRFTTSQTDVYADHLDWHYRQNRTEKDVSRKVTHRRWYYSLTDWIEFEEIADLEERAKSQFFEKVHEEVVLKTQEAAKEKEFQSVPAGPAGAVESCEICQEQFEQYWDEEEEEWHLKNAIRVDGKIYHPSCYEDYQNTSSFDCTPSPSKTPVENPLNIMLNIVKNELQEPCDSPKVKEERIDTPPACTEESIATPSEIKTENDTVESV

SEQ ID NO: 531 - protein, 2120 aa, Homo sapiens
MRSFKRVNFGTLLSSQKEAEELLPALKEFLSNPPAGFPSSRSDAERRQACDAILRACNQQLTAKLACPRHLGSLLELAELACDGYLVSTPQRPPLYLERILFVLLRNAAAQGSPEATLRLAQPLHACLVQCSREAAPQDYEAVARGSFSLLWKGAEALLERRAAFAARLKALSFLVLLEDESTPCEVPHFASPTACRAVAAHQLFDASGHGLNEADADFLDDLLSRHVIRALVGERGSSSGLLSPQRALCLLELTLEHCRRFCWSRHHDKAISAVEKAHSYLRNTNLAPSLQLCQLGVKLLQVGEEGPQAVAKLLIKASAVLSKSMEAPSPPLRALYESCQFFLSGLERGTKRRYRLDAILSLFAFLGGYCSLLQQLRDDGVYGGSSKQQQSFLQMYFQGLHLYTVVVYDFAQGCQIVDLADLTQLVDSCKSTVVWMLEALEGLSGQELTDHMGMTASYTSNLAYSFYSHKLYAEACAISEPLCQHLGLVKPGTYPEVPPEKLHRCFRLQVESLKKLGKQAQGCKMVILWLAALQPCSPEHMAEPVTFWVRVKMDAARAGDKELQLKTLRDSLSGWDPETLALLLREELQAYKAVRADTGQERFNIICDLLELSPEETPAGAWARATHLVELAQVLCYHDFTQQTNCSALDAIREALQLLDSVRPEAQARDQLLDDKAQALLWLYICTLEAKMQEGIERDRRAQAPGNLEEFEVNDLNYEDKLQEDRFLYSNIAFNLAADAAQSKCLDQALALWKELLTKGQAPAVRCLQQTAASLQILAALYQLVAKPMQALEVLLLLRIVSERLKDHSKAAGSSCHITQLLLTLGCPSYAQLHLEEAASSLKHLDQTTDTYLLLSLTCDLLRSQLYWTHQKVTKGVSLLLSVLRDPALQKSSKAWYLLRVQVLQLVAAYLSLPSNNLSHSLWEQLCAQGWQTPEIALIDSHKLLRSIILLLMGSDILSTQKAAVETSFLDYGENLVQKWQVLSEVLSCSEKLVCHLGRLGSVSEAKAFCLEALKLTTKLQIPRQCALFLVLKGELELARNDIDLCQSDLQQVLFLLESCTEFGGVTQHLDSVKKVHLQKGKQQAQVPCPPQLPEEELFLRGPALELVATVAKEPGPIAPSTNSSPVLKTKPQPIPNFLSHSPTCDCSLCASPVLTAVCLRWVLVTAGVRLAMGHQAQGLDLLQVVLKGCPEAAERLTQALQASLNHKTPPSLVPSLLDEILAQAYTLLALEGLNQPSNESLQKVLQSGLKFVAARIPHLEPWRASLLLIWALTKLGGLSCCTTQLFASSWGWQPPLIKSVPGSEPSKTQGQKRSGRGRQKLASAPLRLNNTSQKGLEGRGLPCTPKPPDRIRQAGPHVPFTVFEEVCPTESKPEVPQAPRVQQRVQTRLKVNFSDDSDLEDPVSAEAWLAEEPKRRGTASRGRGRARKGLSLKTDAVVAPGSAPGNPGLNGRSRRAKKVASRHCEERRPQRASDQARPGPEIMRTIPEEELTDNWRKMSFEILRGSDGEDSASGGKTPAPGPEAASGEWELLRLDSSKKKLPSPCPDKESDKDLGPRLRLPSAPVATGLSTLDSICDSLSVAFRGISHCPPSGLYAHLCRFLALCLGHRDPYATAFLVTESVSITCRHQLLTHLHRQLSKAQKHRGSLEIADQLQGLSLQEMPGDVPLARIQRLFSFRALESGHFPQPEKESFQERLALIPSGVTVCVLALATLQPGTVGNTLLLTRLEKDSPPVSVQIPTGQNKLHLRSVLNEFDAIQKAQKENSSCTDKREWWTGRLALDHRMEVLIASLEKSVLGCWKGLLLPSSEEPGPAQEASRLQELLQDCGWKYPDRTLLKIMLSGAGALTPQDIQALAYGLCPTQPERAQELLNEAVGRLQGLTVPSNSHLVLVLDKDLQKLPWESMPSLQALPVTRLPSFRFLLSYSIIKEYGASPVLSQGVDPRSTFYVLNPHNNLSSTEEQFRANFSSEAGWRGVVGEVPRPEQVQEALTKHDLYIYAGHGAGARFLDGQAVLRLSCRAVALLFGCSSAALAVRGNLEGAGIVLKYIMAGCPLFLGNLWDVTDRDIDRYTEALLQGWLGAGPGAPLLYYVNQARQAPRLKYLIGAAPIAYGLPVSLR

SEQ ID NO: 532 - protein, 1618 aa, Homo sapiens
MDGQTLRKAERSWSCSREKKEGYAKDMVTDFDEKHDEYLILLQQRNRILKHLKSKDPVQLRLEHLEQGFSVYVNGANSELKSSPRKAIHSDFSRSASHTEGTHDYGRRTLFREAEEALRRSSRTAPSKVQRRGWHQKSVQIRTEAGPRLHIEPPVDYSDDFELCGDVTLQANNTSEDRPQELRRSLELSVNLQRKQKDCSSDEYDSIEEDILSEPEPEDPALVGHPRHDRPPSSGDWTQKDVHGEQETEGRSSPGPDTLVVLEFNPASKSHKRERNLSAKRKDNAEVFVPTKPEPNLTPQAPAVFPDQERMCSRPGSRRERPLSATRKTLCEAEYPEEDASAVLQAIQVENAALQRALLSRKAEQPASPLQDAEGPPAKPWTSLLEEKEETLELLPITTATTTQEPAGAAGGARAINQAMDRIGLLGSRQQQKLLKVLQAVESDSAHLGRVVSPTKEQVSDTEDKQRMRADEIKDAIYVTMEILSNWGNSWWVGLTEVEFFDLNDTKLYVSPHDVDIRNTATPGELGRLVNRNLAGKKDSSPWTCPFHPPLQLFFVIRNTRQLGDFHLAKIKVRNYWTADGDLDIGAKNVKLYVNRNLIFNGKLDKGDREAPADHSILVDQKNEKSEQLEEAMNAHSEESKGTHEMAGASGDKELGLGCSPPAETLADAKLSSQGNVSGKRKNSTNCRKDSLSQLEEYLRLSAVPTSMGDMPSAPATSPPVKCPPVHEEPSLIQQLENLMGRKICEPPGKTPSWLQPSPTGKDRKQGGRKPKPLWLSPEKPLAWKGRLPSDDVIGEGPGETEARDKGLRHEPGWGTSRSVNTKERPQRATTKVHSDDSDIFNQPPNRERPASGRRGSRKDAGSSSHGDDQPASREDTWSSRTPSRSRWRSEQEHTLHESWSSLSAFDRSHRGRISNTELPGDILDELLQQKSSRHSDLPPSKKGEQPGLSRGQDGYSGETDAGGDFKIPVLPYGQRLVIDIKSTWGDRHYVGLNGIEIFSSKGEPVQISNIKADPPDINILPAYGKDPRVVTNLIDGVNRTQDDMHVWLAPFTRGRSHSITIDFTHPCHVALIRIWNYNKSRIHSFRGVKDITMLLDTQCIFEGEIAKASGTLAGAPEHFGDTILFTTDDDILEAIFYSDEMFDLDVGSLDSLQDEEAMRRPSTADGEGDERPFTQAGLGADERIPELELPSSSPVPQVTTPEPGIYHGICLQLNFTASWGDLHYLGLTGLEVVGKEGQALPIHLHQISASPRDLNELPEYSDDSRALDKLIDGTNITMEDEHMWLIPFSPGLDHVVTIRLDRAESIAGLRFWNYNKSPEDTYRGAKIVHVSLDGLCVSPPEGFLIRKGPGNCHFDFAQEILFVDYLRAQLLPQPARRLDMRSLECASMDYEAPLMPCGFIFQFQLLTSWGDPYYIGLTGLELYDERGEKIPLSENNIAAFPDSVNSLEGVGGDVRTPDKLIDQVNDTSDGRHMWLAPILPGLVNRVYVIFDLPTTVSMIKLWNYAKTPHRGVKEFGLLVDDLLVYNGILAMVSHLVGGILPTCEPTVPYHTILFTEDRDIRHQEKHTTISNQAEDQDVQMMNENQIITNAKRKQSVVDPALRPKTCISEKETRRRRC

SEQ ID NO: 533 - protein, 1692 aa, Homo sapiens
MRRPPPLGPTTASGPEGNVRNLQKRQAPGPGAAGGCGPEAGGCRENKQKRRMVARATPGRGEVESDKSVAASGAGKAARRQVEGRRGPVSPSDSSDPRGLEAAKEAELPLQTERHTKEKRKVTEASSDDPQPGLDLVRKESLTSSESFQTVECLQSLGKESIIEGIKRRIRNKKLKSLENPPLKITENEATQNIKVEFQDELYKNTPKYSCNILSPEVENNSVLKLRDCNCFPHSKGCNDENNLPYKPDGGCMHVAENFSKKENLRSLAEKSDTNSIPQLLQTEENVMGVNKLLPEESDLYQSKTNGLLSCLQHEKNKYSIEESSVGRKPRKRMKLSEKADETVTEMNFSNEYNKSELMLQENQMIADGKEAETKSPLNVLRKVSHNTVSLMDHLLSVPETVEKETSSEHHVNAVFQKTIEPLLKEETENASEPLGYESMASKEDFKSMKSFIGKSPNEYHIERRSSREDLRSASEELKLSCQRTIPMTGKRTWPYYSCARISAWCWKKASLPESSYFLRGSQESCRQVDVPKHQTNQTHLTDSKLLLQSSLTETNTESSSKEKLDSNSNCLSSVSAVEPTLMVIKEPIIKDDKKIKSEELSRRGSEVISNTTEDTQLTSETQSLTGNKKKARGNLTKLNLTATSKDGQEANNSAGKTIHRKACIAQQTFIVPDLVKILNTGRLTNFKIPLLKNKSEKRKEVNAKSSEREAYSPLELLDNLSGADVRQNRSKENVSMMMLGPQTLSIRNSVTPVQASSDSFYNKKSYSISPSFTKQGNNSKPSNHVSEPGNIVSNKEVASLTVENNAFSCDPGYVEKSPSFCCNEQETFRPVSSEVRGRKITKNFSEVGFPDILKAYEDDVLLIDVIQDDPDLFGVSNEGELSFTSEVPKISQEPNVAGEHQSTDSKYMETPVKKEPSDDLRELPVLDCGWIKPDICASNSAESEIKRDPKDVNTSLGEVANETSENETLGDFSEQIKGSDLDEKHRFTDKVITKEEKENIYEVCKSKDSRNADFMVGECQFAVPVPKPLCLLVPPLNLSGRQEDTILNTWMNDFRFLGKHSVLKLQNPETCEIFKREKNVGVFQKSLGLMIPYKYCKFHFNTLRGCERPLCKFAHVPEQGDEKVCMDVFKKYININELCLLQRAVNIFMEYYRKFPPGVYFDLQVLNDLLNSLLKHCLLKEVFQIVNLSIMVKMLPSLKILLNIFEYVATMKLRNAVPALIDIFCKLVEAGMVLDPEHFNYIVKLLYQVQASKQEITAVLEMKSRLQMRRFKKNWKCDLDSALNKLEHCKEKGDWTKLGKLYINVKMGCEKFADFQTFCACIAETLTKNYEDERPDIPFCEFAETVSKDPQNSKVDKGVLGRIGISAMYFYHKLLQWSKGRKVLEKLYELKIHFTSLKGLIGPEKLASRCQIVNVAAEIFLKSGSLDGAIWVMRESEWIINTPLWPCDRLDVLNRHNLLCTIAHEILAKSLYRQTFEVLQNLPGFQNSQETVEVSQYSLLFNKLLGSCIESSSLGMSSSVAEFMISKSIPIDFSFLRRLITSLGRSRLWLKARAHYKSALSLGCYPPLEGNLYRKLLLIPSYLSEIEMLLAIEIFMVSNASSIQSPGTSTQILQIVLKRCEDNQSRSNDDYQAAVERLIMAARISDPKLFVKHMTVNVNKEQVYSLEHCSALKWLKENMKWAGKVWLFSNH

SEQ ID NO: 534 - protein, 1516 aa, Homo sapiens
MDNQQDKAIVASANGENTLINGVKENDSEDQDVAMKSFAALEAAAPIQPTPVAQKETLMYPRGLLPLPSKKPCMQSPPSPLGLIEAPEHAANSASVNAISLTSGIAKGLNTWSLPNECEKAPFAIMEPAGMSALNGDCLMQPSRTCLGCFMESKDAVDPEPGISLKVGDLNRDYETCAVSDIGIQCINAGENMKYGEQLLSDQLLGFPLHKSRAGDRRETEKPDIDLEDPAQKSYYEALLLDKCNTEEALLANSNQDWGYFETFISESKIELLDLCSKNELSVNLFSEEDVDNYMFDDDESTLGSDVCSLKIRYESFQDNVRDKTTLLMQEDAQFNFFPSVFTTCPKRESKSGALKQSSDFSQFKVPDVSIIWGEEDKNLDKKKGKEEGQEDKGVEKKDGKDNGEKPALNKPCSGTEVEQLKNPKQGHLANSLETSGSFSDDSSFIEISYDAMGEIKDCSRYMARDTNSGSSSSQQNYGLRAKRKVRYSEDYLYDVDSLEGEKVNERKEWLPVGSKEEDDDEWCPKKRRKVTRKEPPVIIKYIIINRFKGEKNMLVKLGKVDASETTVNLSENQLNKYAKLAPLKGFWQKKKKQRNTNTDSIKTPFSQKQSFEPGSFEVSFLPPARKRKSKLGNRHRIQRIPSIEISASSKQISLCNDQRHASNHKEDGGLKGTLKSAPLGAPSCANGSHLNDITGPDSVKVKAQDTEFKGPERKVLNKIKFKSEARLKSKKVKAAGQESKPIVQMSPLLENQSSKANLKNEVIPGTSNSSRLSEFHEAKAAKSSTFLPTTCSSEMPLSSANVTTNIPVIPGGYLQTLLDASDLSNNTSISYFSHHSPEQNEGSLTQTEKSFVPLQPTQDCVLTSSSDSELQQSSHNFKMESSNYRNVWPNKATSGTQEFMAEVSREIAPTQSSEFGASQVVSMENNLTPTTYNPICLNSGGSNCNKVLYDSMQDTQLPSDDSYQLCHFNNGEICFPFQQGPVNMDDGRLFSFDSMAPLSVSSSNYCSLSLKSCEKDGDDDITDDFLAHCSPKLVIQQSIDEIAPLKESTDLLDISNFTPDKFRHSSLSEMSPPDTPSLSPQITRCESMKTLGTLKGFQEGVPGPLDSVEKIKWDCSTLSRQVQMEDGFTLNNHQFQFHMFNDEDSVSLLQKNPCLSTFNDPSGQISTNNKVSKSRKKSSPSKSGAMNQSSSQKNTRKKSLKGNNKGIEKPPGKNSRQVPKSTKKGKYMAAINGEKMQIGIGRGGSQTNTISSTGKTLAECIQHGGPMASMKMPSQKGLSGDWALGKESSPGWSDMSMGTNTNSLLDDDQREFQEPSYILSNIASGMADVQRFMMASIEPLWEPMEHHGDPNIFYSPESNSLKLKTLKILAGTPQESKKKINSGSQGATKNHRSIKGVSKSNGKTAIGDPGRANMPGYNEDSRSTFFDKKYSNMSTLGNNGPTHKKLYRHKSSSKALRDEKCKGKHMEREQVHKDESGTASFEKLRDSDYNLLKAETTFWVLPVFEEETRIFQKDI

SEQ ID NO: 535 - protein, 710 aa, Homo sapiens
MKLVFLVLLFLGALGLCLAGRRRSVQWCAVSQPEATKCFQWQRNMRKVRGPPVSCIKRDSPIQCIQAIAENRADAVTLDGGFIYEAGLAPYKLRPVAAEVYGTERQPRTHYYAVAVVKKGGSFQLNELQGLKSCHTGLRRTAGWNVPIGTLRPFLNWTGPPEPIEAAVARFFSASCVPGADKGQFPNLCRLCAGTGENKCAFSSQEPYFSYSGAFKCLRDGAGDVAFIRESTVFEDLSDEAERDEYELLCPDNTRKPVDKFKDCHLARVPSHAVVARSVNGKEDAIWNLLRQAQEKFGKDKSPKFQLFGSPSGQKDLLFKDSAIGFSRVPPRIDSGLYLGSGYFTAIQNLRKSEEEVAARRARVVWCAVGEQELRKCNQWSGLSEGSVTCSSASTTEDCIALVLKGEADAMSLDGGYVYTAGKCGLVPVLAENYKSQQSSDPDPNCVDRPVEGYLAVAVVRRSDTSLTWNSVKGKKSCHTAVDRTAGWNIPMGLLFNQTGSCKFDEYFSQSCAPGSDPRSNLCALCIGDEQGENKCVPNSNERYYGYTGAFRCLAENAGDVAFVKDVTVLQNTDGNNNEAWAKDLKLADFALLCLDGKRKPVTEARSCHLAMAPNHAVVSRMDKVERLKQVLLHQQAKFGRNGSDCPDKFCLFQSETKNLLFNDNTECLARLHGKTTYEKYLGPQYVAGITNLKKCSTSPLLEACEFLRK

SEQ ID NO: 536 - protein, 1747 aa, Homo sapiens
MNWNEKPKSATLPPLYPKSQPPFLHQSLINQITTTSQSSFSYPGSNQEACMYPGNSNPISQPLLNIQNYPQQISVSDMHNGTVVASHTSVERITYANVNGPKQLTHNLQMSSGVTQNVWLNSPMRNPVHSHIGATVSHQTDFGANVPNMPALQSQLITSDTYSMQMQMIPSNSTRLPVAYQGNQGLNQSFSEQQVDWTQQCISKGLTYPDYRPPPKLYRYSPQSFLPDSTIQKQNFIPHTSLQVKNSQLLNSVLTLPSRQTSAVPSQQYATQTDKRPPPPPYNCRYGSQPLQSTQHITKHLSMEVPQSREMLSSEIRTSFQQQWQNPNENVSTIGNFTNLKVNTNSKQPFNSPIRSSVDGVQTLAQTNEEKIMDSCNPTSNQVLDTSVAKEKLVRDIKTLVEIKQKFSELARKIKINKDLLMAAGCIKMTNTSYSEPAQNSKLSLKQTAKIQSGPQITPVMPENAERQTPTVVESAETNKTQCMLNSDIQEVNCRRFNQVDSVLPNPVYSEKRPMPDPSHDVKVLTSKTSAVEMTQAVLNTQLSSENVTKVEQNSPAVCETISVPKSMSTEEYKSKIQNENMLLLALLSQARKTQKTVLKDANQTIQDSKPDSCEMNPNTQMTGNQLNLKNMETPSTSNVSGRVLDNSFCSGQESSTKGMPAKSDSSCSMEVLATCLSLWKKQPSDTAKEKECDKLRTNTTAVGISKPANIHVKSPCSVVGNSNSQNKISNPSQQTALSMVMHNYESSGINITKGTELQIAVVSPLVLSEVKTLSVKGITPAVLPETVYPVIKEGSVCSLQNQLAENAKATAALKVDVSGPVASTATSTKIFPLTQKEKQNESTNGNSEVTPNVNQGKHNKLESAIHSPMNDQQISQESRNSTVVSSDTLQIDNICSLVEGDTSYNSQIAKIFSSLPLKMVEPQKPSLPNQQGIGSREPEKQLDNTTENKDFGFQKDKPVQCTDVSHKICDQSKSEPPLESSFNNLETNRVILEKSSLEHATEKSTANDTCSSAAIQEDIYPQEIDASSNYTPQDPARNEIHSDKAPVLYLHDQLSELLKEFPYGIEAVNTREGSVGQQTTYQTSEDQTADKTSSDSKDPADQIQITILSSEQMKEIFPEQDDQPYVVDKLAEPQKEEPITEVVSQCDLQAPAAGQSRDSVILDSEKDDIHCCALGWLSMVYEGVPQCQCNSIKNSSSEEEKQKEQCSPLDTNSCKQGERTSDRDVTVVQFKSLVNNPKTPPDGKSHFPELQDDSRKDTPKTKHKSLPRTEQELVAGQFSSKCDKLNPLQNHKRKKLRFHEVTFHSSNKMTASYEQASQETRQKKHVTQNSRPLKTKTAFLPNKDVYKKHSSLGQSLSPEKIKLKLKSVSFKQKRKLDQGNVLDMEVKKKKHDKQEQKGSVGATFKLGDSLSNPNERAIVKEKMVSNTKSVDTKASSSKFSRILTPKEYLQRQKHKEALSNKASKKICVKNVPCDSEHMRPSKLAVQVESCGKSNEKHSSGVQTSKESLNGLTSHGKNLKIHHSQESKTYNILRNVKEKVGGKQPDKIWIDKTKLDKLTNISNEAQFSQMPPQVKDQKKLYLNRVGFKCTERESISLTKLESSPRKLHKDKRQENKHKTFLPVKGNTEKSNMLEFKLCPDILLKNTNSVEERKDVKPHPRKEQAPLQVSGIKSTKEDWLKFVATKKRTQKDSQERDNVNSRLSKRSFSADGFEMLQNPVKDSKEMFQTYKQMYLEKRSRSLGSSPVK

SEQ ID NO: 537 - protein, 3526 aa, Homo sapiens
MNMVKRIMGRPRQEECSPQDNALGLMHLRRLFTELCHPPRHMTQKEQEEKLYMMLPVFNRVFGNAPPNTMTEKFSDLLQFTTQVSRLMVTEIRRRASNKSTEAASRAIVQFLEINQSEEASRGWMLLTTINLLASSGQKTVDCMTTMSVPSTLVKCLYLFFDLPHVPEAVGGAQNELPLAERRGLLQKVFVQILVKLCSFVSPAEELAQKDDLQLLFSAITSWCPPYNLPWRKSAGEVLMTISRHGLSVNVVKYIHEKECLSTCVQNMQQSDDLSPLEIVEMFAGLSCFLKDSSDVSQTLLDDFRIWQGYNFLCDLLLRLEQAKEAESKDALKDLVNLITSLTTYGVSELKPAGITTGAPFLLPGFAVPQPAGKGHSVRNVQAFAVLQNAFLKAKTSFLAQIILDAITNIYMADNANYFILESQHTLSQFAEKISKLPEVQNKYFEMLEFVVFSLNYIPCKELISVSILLKSSSSYHCSIIAMKTLLKFTRHDYIFKDVFREVGLLEVMVNLLHKYAALLKDPTQALNEQGDSRNNSSVEDQKHLALLVMETLTVLLQGSNTNAGIFREFGGARCAHNIVKYPQCRQHALMTIQQLVLSPNGDDDMGTLLGLMHSAPPTELQLKTDILRALLSVLRESHRSRTVFRKVGGFVYITSLLVAMERSLSCPPKNGWEKVNQNQVFELLHTVFCTLTAAMRYEPANSHFFKTEIQYEKLADAVRFLGCFSDLRKISAMNVFPSNTQPFQRLLEEDVISIESVSPTLRHCSKLFIYLYKVATDSFDSRAEQIPPCLTSESSLPSPWGTPALSRKRHAYHSVSTPPVYPPKNVADLKLHVTTSSLQSSDAVIIHPGAMLAMLDLLASVGSVTQPEHALDLQLAVANILQSLVHTERNQQVMCEAGLHARLLQRCSAALADEDHSLHPPLQRMFERLASQALEPMVLREFLRLASPLNCGAWDKKLLKQYRVHKPSSLSYEPEMRSSMITSLEGLGTDNVFSLHEDNHYRISKSLVKSAEGSTVPLTRVKCLVSMTTPHDIRLHGSSVTPAFVEFDTSLEGFGCLFLPSLAPHNAPTNNTVTTGLIDGAVVSGIGSGERFFPPPSGLSYSSWFCIEHFSSPPNNHPVRLLTVVRRANSSEQHYVCLAIVLSAKDRSLIVSTKEELLQNYVDDFSEESSFYEILPCCARFRCGELIIEGQWHHLVLVMSKGMLKNSTAALYIDGQLVNTVKLHYVHSTPGGSGSANPPVVSTVYAYIGTPPAQRQIASLVWRLGPTHFLEEVLPSSNVTTIYELGPNYVGSFQAVCMPCKDAKSEGVVPSPVSLVPEEKVSFGLYALSVSSLTVARIRKVYNKLDSKAIAKQLGISSHENATPVKLIHNSAGHLNGSARTIGAALIGYLGVRTFVPKPVATTLQYVGGAAAILGLVAMASDVEGLYAAVKALVCVVKSNPLASKEMERIKGYQLLAMLLKKKRSLLNSHILHLTFSLVGTVDSGHETSIIPNSTAFQDLLCDFEVWLHAPYELHLSLFEHFIELLTESSEASKNAKLMREFQLIPKLLLTLRDMSLSQPTIAAISNVLSFLLQGFPSSNDLLRFGQFISSTLPTFAVCEKFVVMEINNEEKLDTGTEEEFGGLVSANLILLRNRLLDILLKLIYTSKEKTSINLQACEELVKTLGFDWIMMFMEEHLHSTTVTAAMRILVVLLSNQSILIKFKEGLSGGGWLEQTDSVLTNKIGTVLGFNVGRSAGGRSTVREINRDACHFPGFPVLQSFLPKHTNVPALYFLLMALFLQQPVSELPENLQVSVPVISCRSKQGCQFDLDSIWTFIFGVPASSGTVVSSIHNVCTEAVFLLLGMLRSMLTSPWQSEEEGSWLREYPVTLMQFFRYLYHNVPDLASMWMSPDFLCALAATVFPFNIRPYSEMVTDLDDEVGSPAEEFKAFAADTGMNRSQSEYCNVGTKTYLTNHPAKKFVFDFMRVLIIDNLCLTPASKQTPLIDLLLEASPERSTRTQQKEFQTYILDSVMDHLLAADVLLGEDASLPITSGGSYQVLVNNVFYFTQRVVDKLWQGMFNKESKLLIDFIIQLIAQSKRRSQGLSLDAVYHCLNRTILYQFSRAHKTVPQQVALLDSLRVLTVNRNLILGPGNHDQEFISCLAHCLINLHVGSNVDGFGLEAEARMTTWHIMIPSDIEPDGSYSQDISEGRQLLIKAVNRVWTELIHSKKQVLEELFKVTLPVNERGHVDIATARPLIEEAALKCWQNHLAHEKKCISRGEALAPTTQSKLSRVSSGFGLSKLTGSRRNRKESGLNKHSLSTQEISQWMFTHIAVVRDLVDTQYKEYQERQQNALKYVTEEWCQIECELLRERGLWGPPIGSHLDKWMLEMTEGPCRMRKKMVRNDMFYNHYPYVPETEQETNVASEIPSKQPETPDDIPQKKPARYRRAVSYDSKEYYMRLASGNPAIVQDAIVESSEGEAAQQEPEHGEDTIAKVKGLVKPPLKRSRSAPDGGDEENQEQLQDQIAEGSSIEEEEKTDNATLLRLLEEGEKIQHMYRCARVQGLDTSEGLLLFGKEHFYVIDGFTMTATREIRDIETLPPNMHEPIIPRGARQGPSQLKRTCSIFAYEDIKEVHKRRYLLQPIAVEVFSGDGRNYLLAFQKGIRNKVYQRFLAVVPSLTDSSESVSGQRPNTSVEQGSGLLSTLVGEKSVTQRWERGEISNFQYLMHLNTLAGRSYNDLMQYPVFPWILADYDSEEVDLTNPKTFRNLAKPMGAQTDERLAQYKKRYKDWEDPNGETPAYHYGTHYSSAMIVASYLVRMEPFTQIFLRLQGGHFDLADRMFHSVREAWYSASKHNMADVKELIPEFFYLPEFLFNSNNFDLGCKQNGTKLGDVILPPWAKGDPREFIRVHREALECDYVSAHLHEWIDLIFGYKQQGPAAVEAVNVFHHLFYEGQVDIYNINDPLKETATIGFINNFGQIPKQLFKKPHPPKRVRSRLNGDNAGISVLPGSTSDKIFFHHLDNLRPSLTPVKELKEPVGQIVCTDKGILAVEQNKVLIPPTWNKTFAWGYADLSCRLGTYESDKAMTVYECLSEWGQILCAICPNPKLVITGGTSTVVCVWEMGTSKEKAKTVTLKQALLGHTDTVTCATASLAYHIIVSGSRDRTCIIWDLNKLSFLTQLRGHRAPVSALCINELTGDIVSCAGTYIHVWSINGNPIVSVNTFTGRSQQIICCCMSEMNEWDTQNVIVTGHSDGVVRFWRMEFLQVPETPAPEPAEVLEMQEDCPEAQIGQEAQDEDSSDSEADEQSISQDPKDTPSQPSSTSHRPRAASCRATAAWCTDSGSDDSRRWSDQLSLDEKDGFIFVNYSEGQTRAHLQGPLSHPHPNPIEVRNYSRLKPGYRWERQLVFRSKLTMHTAFDRKDNAHPAEVTALGISKDHSRILVGDSRGRVFSWSVSDQPGRSAADHWVKDEGGDSCSGCSVRFSLTERRHHCRNCGQLFCQKCSRFQSEIKRLKISSPVRVCQNCYYNLQHERGSEDGPRNC

SEQ ID NO: 538 - protein, 1359 aa, Homo sapiens
MVGEGPYLISDLDQRGRRRSFAERYDPSLKTMIPVRPCARLAPNPVDDAGLLSFATFSWLTPVMVKGYRQRLTVDTLPPLSTYDSSDTNAKRFRVLWDEEVARVGPEKASLSHVVWKFQRTRVLMDIVANILCIIMAAIGPVILIHQILQQTERTSGKVWVGIGLCIALFATEFTKVFFWALAWAINYRTAIRLKVALSTLVFENLVSFKTLTHISVGEVLNILSSDSYSLFEAALFCPLPATIPILMVFCAAYAFFILGPTALIGISVYVIFIPVQMFMAKLNSAFRRSAILVTDKRVQTMNEFLTCIRLIKMYAWEKSFTNTIQDIRRRERKLLEKAGFVQSGNSALAPIVSTIAIVLTLSCHILLRRKLTAPVAFSVIAMFNVMKFSIAILPFSIKAMAEANVSLRRMKKILIDKSPPSYITQPEDPDTVLLLANATLTWEHEASRKSTPKKLQNQKRHLCKKQRSEAYSERSPPAKGATGPEEQSDSLKSVLHSISFVVRKGKILGICGNVGSGKSSLLAALLGQMQLQKGVVAVNGTLAYVSQQAWIFHGNVRENILFGEKYDHQRYQHTVRVCGLQKDLSNLPYGDLTEIGERGLNLSGGQRQRISLARAVYSDRQLYLLDDPLSAVDAHVGKHVFEECIKKTLRGKTVVLVTHQLQFLESCDEVILLEDGEICEKGTHKELMEERGRYAKLIHNLRGLQFKDPEHLYNAAMVEAFKESPAEREEDAGIIVLAPGNEKDEGKESETGSEFVDTKVPEHQLIQTESPQEGTVTWKTYHTYIKASGGYLLSLFTVFLFLLMIGSAAFSNWWLGLWLDKGSRMTCGPQGNRTMCEVGAVLADIGQHVYQWVYTASMVFMLVFGVTKGFVFTKTTLMASSSLHDTVFDKILKSPMSFFDTTPTGRLMNRFSKDMDELDVRLPFHAENFLQQFFMVVFILVILAAVFPAVLLVVASLAVGFFILLRIFHRGVQELKKVENVSRSPWFTHITSSMQGLGIIHAYGKKESCITYHLLYFNCALRWFALRMDVLMNILTFTVALLVTLSFSSISTSSKGLSLSYIIQLSGLLQVCVRTGTETQAKFTSVELLREYISTCVPECTHPLKVGTCPKDWPSRGEITFRDYQMRYRDNTPLVLDSLNLNIQSGQTVGIVGRTGSGKSSLGMALFRLVEPASGTIFIDEVDICILSLEDLRTKLTVIPQDPVLFVGTVRYNLDPFESHTDEMLWQVLERTFMRDTIMKLPEKLQAEVTENGENFSVGERQLLCVARALLRNSKIILLDEATASMDSKTDTLVQNTIKDAFKGCTVLTIAHRLNTVLNCDHVLVMENGKVIEFDKPEVLAEKPDSAFAMLLAAEVRL

SEQ ID NO: 539 - protein, 2174 aa, Homo sapiens
MSASFVPNGASLEDCHCNLFCLADLTGIKWKKYVWQGPTSAPILFPVTEEDPILSSFSRCLKADVLGVWRRDQRPGRRELWIFWWGEDPSFADLIHHDLSEEEDGVWENGLSYECRTLLFKAVHNLLERCLMNRNFVRIGKWFVKPYEKDEKPINKSEHLSCSFTFFLHGDSNVCTSVEINQHQPVYLLSEEHITLAQQSNSPFQVILCPFGLNGTLTGQAFKMSDSATKKLIGEWKQFYPISCCLKEMSEEKQEDMDWEDDSLAAVEVLVAGVRMIYPACFVLVPQSDIPTPSPVGSTHCSSSCLGVHQVPASTRDPAMSSVTLTPPTSPEEVQTVDPQSVQKWVKFSSVSDGFNSDSTSHHGGKIPRKLANHVVDRVWQECNMNRAQNKRKYSASSGGLCEEATAAKVASWDFVEATQRTNCSCLRHKNLKSRNAGQQGQAPSLGQQQQILPKHKTNEKQEKSEKPQKRPLTPFHHRVSVSDDVGMDADSASQRLVISAPDSQVRFSNIRTNDVAKTPQMHGTEMANSPQPPPLSPHPCDVVDEGVTKTPSTPQSQHFYQMPTPDPLVPSKPMEDRIDSLSQSFPPQYQEAVEPTVYVGTAVNLEEDEANIAWKYYKFPKKKDVEFLPPQLPSDKFKDDPVGPFGQESVTSVTELMVQCKKPLKVSDELVQQYQIKNQCLSAIASDAEQEPKIDPYAFVEGDEEFLFPDKKDRQNSEREAGKKHKVEDGTSSVTVLSHEEDAMSLFSPSIKQDAPRPTSHARPPSTSLIYDSDLAVSYTDLDNLFNSDEDELTPGSKKSANGSDDKASCKESKTGNLDPLSCISTADLHKMYPTPPSLEQHIMGFSPMNMNNKEYGSMDTTPGGTVLEGNSSSIGAQFKIEVDEGFCSPKPSEIKDFSYVYKPENCQILVGCSMFAPLKTLPSQYLPPIKLPEECIYRQSWTVGKLELLSSGPSMPFIKEGDGSNMDQEYGTAYTPQTHTSFGMPPSSAPPSNSGAGILPSPSTPRFPTPRTPRTPRTPRGAGGPASAQGSVKYENSDLYSPASTPSTCRPLNSVEPATVPSIPEAHSLYVNLILSESVMNLFKDCNFDSCCICVCNMNIKGADVGVYIPDPTQEAQYRCTCGFSAVMNRKFGNNSGLFLEDELDIIGRNTDCGKEAEKRFEALRATSAEHVNGGLKESEKLSDDLILLLQDQCTNLFSPFGAADQDPFPKSGVISNWVRVEERDCCNDCYLALEHGRQFMDNMSGGKVDEALVKSSCLHPWSKRNDVSMQCSQDILRMLLSLQPVLQDAIQKKRTVRPWGVQGPLTWQQFHKMAGRGSYGTDESPEPLPIPTFLLGYDYDYLVLSPFALPYWERLMLEPYGSQRDIAYVVLCPENEALLNGAKSFFRDLTAIYESCRLGQHRPVSRLLTDGIMRVGSTASKKLSEKLVAEWFSQAADGNNEAFSKLKLYAQVCRYDLGPYLASLPLDSSLLSQPNLVAPTSQSLITPPQMTNTGNANTPSATLASAASSTMTVTSGVAISTSVATANSTLTTASTSSSSSSNLNSGVSSNKLPSFPPFGSMNSNAAGSMSTQANTVQSGQLGGQQTSALQTAGISGESSSLPTQPHPDVSESTMDRDKVGIPTDGDSHAVTYPPAIVVYIIDPFTYENTDESTNSSSVWTLGLLRCFLEMVQTLPPHIKSTVSVQIIPCQYLLQPVKHEDREIYPQHLKSLAFSAFTQCRRPLPTSTNVKTLTGFGPGLAMETALRSPDRPECIRLYAPPFILAPVKDKQTELGETFGEAGQKYNVLFVGYCLSHDQRWILASCTDLYGELLETCIINIDVPNRARRKKSSARKFGLQKLWEWCLGLVQMSSLPWRVVIGRLGRIGHGELKDWSCLLSRRNLQSLSKRLKDMCRMCGISAADSPSILSACLVAMEPQGSFVIMPDSVSTGSVFGRSTTLNMQTSQLNTPQDTSCTHILVFPTSASVQVASATYTTENLDLAFNPNNDGADGMGIFDLLDTGDDLDPDIINILPASPTGSPVHSPGSHYPHGGDAGKGQSTDRLLSTEPHEEVPNILQQPLALGYFVSTAKAGPLPDWFWSACPQAQYQCPLFLKASLHLHVPSVQSDELLHSKHSHPLDSNQTSDVLRFVLEQYNALSWLTCDPATQDRRSCLPIHFVVLNQLYNFIMNML

SEQ ID NO: 540 - protein, 2521 aa, Homo sapiens
MEPHVLGAVLYWLLLPCALLAACLLRFSGLSLVYLLFLLLLPWFPGPTRCGLQGHTGRLLRALLGLSLLFLVAHLALQICLHIVPRLDQLLGPSCSRWETLSRHIGVTRLDLKDIPNAIRLVAPDLGILVVSSVCLGICGRLARNTRQSPHPRELDDDERDVDASPTAGLQEAATLAPTRRSRLAARFRVTAHWLLVAAGRVLAVTLLALAGIAHPSALSSVYLLLFLALCTWWACHFPISTRGFSRLCVAVGCFGAGHLICLYCYQMPLAQALLPPAGIWARVLGLKDFVGPTNCSSPHALVLNTGLDWPVYASPGVLLLLCYATASLRKLRAYRPSGQRKEAAKGYEARELELAELDQWPQERESDQHVVPTAPDTEADNCIVHELTGQSSVLRRPVRPKRAEPREASPLHSLGHLIMDQSYVCALIAMMVWSITYHSWLTFVLLLWACLIWTVRSRHQLAMLCSPCILLYGMTLCCLRYVWAMDLRPELPTTLGPVSLRQLGLEHTRYPCLDLGAMLLYTLTFWLLLRQFVKEKLLKWAESPAALTEVTVADTEPTRTQTLLQSLGELVKGVYAKYWIYVCAGMFIVVSFAGRLVVYKIVYMFLFLLCLTLFQVYYSLWRKLLKAFWWLVVAYTMLVLIAVYTFQFQDFPAYWRNLTGFTDEQLGDLGLEQFSVSELFSSILVPGFFLLACILQLHYFHRPFMQLTDMEHVSLPGTRLPRWAHRQDAVSGTPLLREEQQEHQQQQQEEEEEEEDSRDEGLGVATPHQATQVPEGAAKWGLVAERLLELAAGFSDVLSRVQVFLRRLLELHVFKLVALYTVWVALKEVSVMNLLLVVLWAFALPYPRFRPMASCLSTVWTCVIIVCKMLYQLKVVNPQEYSSNCTEPFPNSTNLLPTEISQSLLYRGPVDPANWFGVRKGFPNLGYIQNHLQVLLLLVFEAIVYRRQEHYRRQHQLAPLPAQAVFASGTRQQLDQDLLGCLKYFINFFFYKFGLEICFLMAVNVIGQRMNFLVTLHGCWLVAILTRRHRQAIARLWPNYCLFLALFLLYQYLLCLGMPPALCIDYPWRWSRAVPMNSALIKWLYLPDFFRAPNSTNLISDFLLLLCASQQWQVFSAERTEEWQRMAGVNTDRLEPLRGEPNPVPNFIHCRSYLDMLKVAVFRYLFWLVLVVVFVTGATRISIFGLGYLLACFYLLLFGTALLQRDTRARLVLWDCLILYNVTVIISKNMLSLLACVFVEQMQTGFCWVIQLFSLVCTVKGYYDPKEMMDRDQDCLLPVEEAGIIWDSVCFFFLLLQRRVFLSHYYLHVRADLQATALLASRGFALYNAANLKSIDFHRRIEEKSLAQLKRQMERIRAKQEKHRQGRVDRSRPQDTLGPKDPGLEPGPDSPGGSSPPRRQWWRPWLDHATVIHSGDYFLFESDSEEEEEAVPEDPRPSAQSAFQLAYQAWVTNAQAVLRRRQQEQEQARQEQAGQLPTGGGPSQEVEPAEGPEEAAAGRSHVVQRVLSTAQFLWMLGQALVDELTRWLQEFTRHHGTMSDVLRAERYLLTQELLQGGEVHRGVLDQLYTSQAEATLPGPTEAPNAPSTVSSGLGAEEPLSSMTDDMGSPLSTGYHTRSGSEEAVTDPGEREAGASLYQGLMRTASELLLDRRLRIPELEEAELFAEGQGRALRLLRAVYQCVAAHSELLCYFIIILNHMVTASAGSLVLPVLVFLWAMLSIPRPSKRFWMTAIVFTEIAVVVKYLFQFGFFPWNSHVVLRRYENKPYFPPRILGLEKTDGYIKYDLVQLMALFFHRSQLLCYGLWDHEEDSPSKEHDKSGEEEQGAEEGPGVPAATTEDHIQVEARVGPTDGTPEPQVELRPRDTRRISLRFRRRKKEGPARKGAAAIEAEDREEEEGEEEKEAPTGREKRPSRSGGRVRAAGRRLQGFCLSLAQGTYRPLRRFFHDILHTKYRAATDVYALMFLADVVDFIIIIFGFWAFGKHSAATDITSSLSDDQVPEAFLVMLLIQFSTMVVDRALYLRKTVLGKLAFQVALVLAIHLWMFFILPAVTERMFNQNVVAQLWYFVKCIYFALSAYQIRCGYPTRILGNFLTKKYNHLNLFLFQGFRLVPFLVELRAVMDWVWTDTTLSLSSWMCVEDIYANIFIIKCSRETEKKYPQPKGQKKKKIVKYGMGGLIILFLIAIIWFPLLFMSLVRSVVGVVNQPIDVTVTLKLGGYEPLFTMSAQQPSIIPFTAQAYEELSRQFDPQPLAMQFISQYSPEDIVTAQIEGSSGALWRISPPSRAQMKRELYNGTADITLRFTWNFQRDLAKGGTVEYANEKHMLALAPNSTARRQLASLLEGTSDQSVVIPNLFPKYIRAPNGPEANPVKQLQPNEEADYLGVRIQLRREQGAGATGFLEWWVIELQECRTDCNLLPMVIFSDKVSPPSLGFLAGYGIMGLYVSIVLVIGKFVRGFFSEISHSIMFEELPCVDRILKLCQDIFLVRETRELELEEELYAKLIFLYRSPETMIKWTREKE

SEQ ID NO: 541 - protein, 1761 aa, Homo sapiens
MADAAASPVGKRLLLLFADTAASASASAPAAAAASGDPGPALRTRAWRAGTVRAMSGAVPQDLAIFVEFDGCNWKQHSWVKVHAEEVIVLLLEGSLVWAPREDPVLLQGIRVSIAQWPALTFTPLVDKLGLGSVVPVEYLLDRELRFLSDANGLHLFQMGTDSQNQILLEHAALRETVNALISDQKLQEIFSRGPYSVQGHRVKIYQPEGEEGWLYGVVSHQDSITRLMEVSVTESGEIKSVDPRLIHVMLMDNSTPQSEGGTLKAVKSSKGKKKRESIEGKDGRRRKSASDSGCDPASKKLKGDRGEVDSNGSDGGEASRGPWKGGNASGEPGLDQRAKQPPSTFVPQINRNIRFATYTKENGRTLVVQDEPVGGDTPASFTPYSTATGQTPLAPEVGGAENKEAGKTLEQVGQGIVASAAVVTTASSTPNTVRISDTGLAAGTVPEKQKGSRSQASGENSRNSILASSGFGAPLPSSSQPLTFGSGRSQSNGVLATENKPLGFSFGCSSAQEAQKDTDLSKNLFFQCMSQTLPTSNYFTTVSESLADDSSSRDSFKQSLESLSSGLCKGRSVLGTDTKPGSKAGSSVDRKVPAESMPTLTPAFPRSLLNARTPENHENLFLQPPKLSREEPSNPFLAFVEKVEHSPFSSFASQASGSSSSATTVTSKVAPSWPESHSSADSASLAKKKPLFITTDSSKLVSGVLGSALTSGGPSLSAMGNGRSSSPTSSLTQPIEMPTLSSSPTEERPTVGPGQQDNPLLKTFSNVFGRHSGGFLSSPADFSQENKAPFEAVKRFSLDERSLACRQDSDSSTNSDLSDLSDSEEQLQAKTGLKGIPEHLMGKLGPNGERSAELLLGKSKGKQAPKGRPRTAPLKVGQSVLKDVSKVKKLKQSGEPFLQDGSCINVAPHLHKCRECRLERYRKFKEQEQDDSTVACRFFHFRRLIFTRKGVLRVEGFLSPQQSDPDAMNLWIPSSSLAEGIDLETSKYILANVGDQFCQLVMSEKEAMMMVEPHQKVAWKRAVRGVREMCDVCETTLFNIHWVCRKCGFGVCLDCYRLRKSRPRSETEEMGDEEVFSWLKCAKGQSHEPENLMPTQIIPGTALYNIGDMVHAARGKWGIKANCPCISRQNKSVLRPAVTNGMSQLPSINPSASSGNETTFSGGGGPAPVTTPEPDHVPKADSTDIRSEEPLKTDSSASNSNSELKAIRPPCPDTAPPSSALHWLADLATQKAKEETKEAGSLRSVLNKESHSPFGLDSFNSTAKVSPLTPKLFNSLLLGPTASNNKTEGSSLRDLLHSGPGKLPQTPLDTGIPFPPVFSTSSAGVKSKASLPNFLDHIIASVVENKKTSDASKRACNLTDTQKEVKEMVMGLNVLDPHTSHSWLCDGRLLCLHDPSNKNNWKIFRECWKQGQPVLVSGVHKKLKSELWKPEAFSQEFGDQDVDLVNCRNCAIISDVKVRDFWDGFEIICKRLRSEDGQPMVLKLKDWPPGEDFRDMMPTRFEDLMENLPLPEYTKRDGRLNLASRLPSYFVRPDLGPKMYNAYGLITAEDRRVGTTNLHLDVSDAVNVMVYVGIPIGEGAHDEEVLKTIDEGDADEVTKQRIHDGKEKPGALWHIYAAKDAEKIRELLRKVGEEQGQENPPDHDPIHDQSWYLDQTLRKRLYEEYGVQGWAIVQFLGDAVFIPAGAPHQVHNLYSCIKVAEDFVSPEHVKHCFRLTQEFRHLSNTHTNHEDKLQVKNIIYHAVKDAVGTLKAHESKLARS

SEQ ID NO: 542 - protein, 1708 aa, Homo sapiens
MAAIGRGRSLKNLRVRGRNDSGEENVPLDLTREPSDNLREILQNVARLQGVSNMRKLGHLNNFTKLLCDIGHSEEKLGFHYEDIIICLRLALLNEAKEVRAAGLRALRYLIQDSSILQKVLKLKVDYLIARCIDIQQSNEVERTQALRLVRKMITVNASLFPSSVTNSLIAVGNDGLQERDRMVRACIAIICELALQNPEVVALRGGLNTILKNVIDCQLSRINEALITTILHLLNHPKTRQYVRADVELERILAPYTDFHYRHSPDTAEGQLKEDREARFLASKMGIIATFRSWAGIINLCKPGNSGIQSLIGVLCIPNMEIRRGLLEVLYDIFRLPLPVVTEEFIEALLSVDPGRFQDSWRLSDGFVAAEAKTILPHRARSRPDLMDNYLALILSAFIRNGLLEGLVEVITNSDDHISVRATILLGELLHMANTILPHSHSHHLHCLPTLMNMAASFDIPKEKRLRASAALNCLKRFHEMKKRGPKPYSLHLDHIIQKAIATHQKRDQYLRVQKDIFILKDTEEALLINLRDSQVLQHKENLEWNWNLIGTILKWPNVNLRNYKDEQLHRFVRRLLYFYKPSSKLYANLDLDFAKAKQLTVVGCQFTEFLLESEEDGQGYLEDLVKDIVQWLNASSGMKPERSLQNNGLLTTLSQHYFLFIGTLSCHPHGVKMLEKCSVFQCLLNLCSLKNQDHLLKLTVSSLDYSRDGLARVILSKILTAATDACRLYATKHLRVLLRANVEFFNNWGIELLVTQLHDKNKTISSEALDILDEACEDKANLHALIQMKPALSHLGDKGLLLLLRFLSIPKGFSYLNERGYVAKQLEKWHREYNSKYVDLIEEQLNEALTTYRKPVDGDNYVRRSNQRLQRPHVYLPIHLYGQLVHHKTGCHLLEVQNIITELCRNVRTPDLDKWEEIKKLKASLWALGNIGSSNWGLNLLQEENVIPDILKLAKQCEVLSIRGTCVYVLGLIAKTKQGCDILKCHNWDAVRHSRKHLWPVVPDDVEQLCNELSSIPSTLSLNSESTSSRHNSESESVPSSMFILEDDRFGSSSTSTFFLDINEDTEPTFYDRSGPIKDKNSFPFFASSKLVKNRILNSLTLPNKKHRSSSDPKGGKLSSESKTSNRRIRTLTEPSVDFNHSDDFTPISTVQKTLQLETSFMGNKHIEDTGSTPSIGENDLKFTKNFGTENHRENTSRERLVVESSTSSHMKIRSQSFNTDTTTSGISSMSSSPSRETVGVDATTMDTDCGSMSTVVSTKTIKTSHYLTPQSNHLSLSKSNSVSLVPPGSSHTLPRRAQSLKAPSIATIKSLADCNFSYTSSRDAFGYATLKRLQQQRMHPSLSHSEALASPAKDVLFTDTITMKANSFESRLTPSRFMKALSYASLDKEDLLSPINQNTLQRSSSVRSMVSSATYGGSDDYIGLALPVDINDIFQVKDIPYFQTKNIPPHDDRGARAFAHDAGGLPSGTGGLVKNSFHLLRQQMSLTEIMNSIHSDASLFLESTEDTGLQEHTDDNCLYCVCIEILGFQPSNQLSAICSHSDFQDIPYSDWCEQTIHNPLEVVPSKFSGISGCSDGVSQEGSASSTKSTELLLGVKTIPDDTPMCRILLRKEVLRLVINLSSSVSTKCHETGLLTIKEKYPQTFDDICLYSEVSHLLSHCTFRLPCRRFIQELFQDVQFLQMHEEAEAVLATPPKQPIVDTSAES

SEQ ID NO: 543 - protein, 2201 aa, Homo sapiens
MGAMTQLLAGVFLAFLALATEGGVLKKVIRHKRQSGVNATLPEENQPVVFNHVYNIKLPVGSQCSVDLESASGEKDLAPPSEPSESFQEHTVDGENQIVFTHRINIPRRACGCAAAPDVKELLSRLEELENLVSSLREQCTAGAGCCLQPATGRLDTRPFCSGRGNFSTEGCGCVCEPGWKGPNCSEPECPGNCHLRGRCIDGQCICDDGFTGEDCSQLACPSDCNDQGKCVNGVCICFEGYAGADCSREICPVPCSEEHGTCVDGLCVCHDGFAGDDCNKPLCLNNCYNRGRCVENECVCDEGFTGEDCSELICPNDCFDRGRCINGTCYCEEGFTGEDCGKPTCPHACHTQGRCEEGQCVCDEGFAGVDCSEKRCPADCHNRGRCVDGRCECDDGFTGADCGELKCPNGCSGHGRCVNGQCVCDEGYTGEDCSQLRCPNDCHSRGRCVEGKCVCEQGFKGYDCSDMSCPNDCHQHGRCVNGMCVCDDGYTGEDCRDRQCPRDCSNRGLCVDGQCVCEDGFTGPDCAELSCPNDCHGQGRCVNGQCVCHEGFMGKDCKEQRCPSDCHGQGRCVDGQCICHEGFTGLDCGQHSCPSDCNNLGQCVSGRCICNEGYSGEDCSEVSPPKDLVVTEVTEETVNLAWDNEMRVTEYLVVYTPTHEGGLEMQFRVPGDQTSTIIQELEPGVEYFIRVFAILENKKSIPVSARVATYLPAPEGLKFKSIKETSVEVEWDPLDIAFETWEIIFRNMNKEDEGEITKSLRRPETSYRQTGLAPGQEYEISLHIVKNNTRGPGLKRVTTTRLDAPSQIEVKDVTDTTALITWFKPLAEIDGIELTYGIKDVPGDRTTIDLTEDENQYSIGNLKPDTEYEVSLISRRGDMSSNPAKETFTTGLDAPRNLRRVSQTDNSITLEWRNGKAAIDSYRIKYAPISGGDHAEVDVPKSQQATTKTTLTGLRPGTEYGIGVSAVKEDKESNPATINAATELDTPKDLQVSETAETSLTLLWKTPLAKFDRYRLNYSLPTGQWVGVQLPRNTTSYVLRGLEPGQEYNVLLTAEKGRHKSKPARVKASTEQAPELENLTVTEVGWDGLRLNWTAADQAYEHFIIQVQEANKVEAARNLTVPGSLRAVDIPGLKAATPYTVSIYGVIQGYRTPVLSAEASTGETPNLGEVVVAEVGWDALKLNWTAPEGAYEYFFIQVQEADTVEAAQNLTVPGGLRSTDLPGLKAATHYTITIRGVTQDFSTTPLSVEVLTEEVPDMGNLTVTEVSWDALRLNWTTPDGTYDQFTIQVQEADQVEEAHNLTVPGSLRSMEIPGLRAGTPYTVTLHGEVRGHSTRPLAVEVVTEDLPQLGDLAVSEVGWDGLRLNWTAADNAYEHFVIQVQEVNKVEAAQNLTLPGSLRAVDIPGLEAATPYRVSIYGVIRGYRTPVLSAEASTAKEPEIGNLNVSDITPESFNLSWMATDGIFETFTIEIIDSNRLLETVEYNISGAERTAHISGLPPSTDFIVYLSGLAPSIRTKTISATATTEALPLLENLTISDINPYGFTVSWMASENAFDSFLVTVVDSGKLLDPQEFTLSGTQRKLELRGLITGIGYEVMVSGFTQGHQTKPLRAEIVTEAEPEVDNLLVSDATPDGFRLSWTADEGVFDNFVLKIRDTKKQSEPLEITLLAPERTRDITGLREATEYEIELYGISKGRRSQTVSAIATTAMGSPKEVIFSDITENSATVSWRAPTAQVESFRITYVPITGGTPSMVTVDGTKTQTRLVKLIPGVEYLVSIIAMKGFEESEPVSGSFTTALDGPSGLVTANITDSEALARWQPAIATVDSYVISYTGEKVPEITRTVSGNTVEYALTDLEPATEYTLRIFAEKGPQKSSTITAKFTTDLDSPRDLTATEVQSETALLTWRPPRASVTGYLLVYESVDGTVKEVIVGPDTTSYSLADLSPSTHYTAKIQALNGPLRSNMIQTIFTTIGLLYPFPKDCSQAMLNGDTTSGLYTIYLNGDKAEALEVFCDMTSDGGGWIVFLRRKNGRENFYQNWKAYAAGFGDRREEFWLGLDNLNKITAQGQYELRVDLRDHGETAFAVYDKFSVGDAKTRYKLKVEGYSGTAGDSMAYHNGRSFSTFDKDTDSAITNCALSYKGAFWYRNCHRVNLMGRYGDNNHSQGVNWFHWKGHEHSIQFAEMKLRPSNFRNLEGRRKRA

SEQ ID NO: 544 - protein, 2754 aa, Homo sapiens
MAASERLYELWLLYYAQKDLGYLQQWLKAFVGAFKKSISLSSLEPRRPEEAGAEVPLLPLDELHVLAEQLHQADLEQALLLLKLFIILCRNLENIEAGRGQVLVPRVLALLTKLVAELKGCPPPQGRGTQLENVALHALLLCEGLFDPYQTWRRQRSGEVISSKEKSKYKFPPAALPQEFSAFFQESLQNADHLPPILLLRLIHLFCAVLAGGKENGQMAVSDGSVKGLLSVVRGWSRGPAPDPCLVPLALEALVGAVHVLHASRAPPRGPELRALLESYFHVLNADWPAGLSSGPEEALVTLRVSMLDAIPMMLACEDRPVLQATFLSNNCFEHLTRLIQNSKLYLQSRAPPEGDSDLATRLLTEPDVQKVLDQDTDAIAVHVVRVLTCIMSDSPSAKEVFKERIGYPHLQEVLQSHGPPTHRLLQELLNMAVEGDHSMCPPPPIRNEQPVLVLAQWLPSLPTAELRLFLAQRLRWLCDSCPASRATCVQAGLVGCLLETLSTGLALEARCQEQLLALLQALGRVSIRPMELRHLLRPRPGLDSEPGGAEAGKARHAGAVIRTLSGMARHQGPARALRYFDLTPSMAGIMVPPVQRWPGPGFTFHAWLCLHPMDTAPTPAPTRPLQRKQLYSFFTSSGSGFEAFFTAAGTLVVAVCTRKEYLTMSLPEVSFADSAWHCVAIVHVPGRRPFSQNLVHVYKDGHLVKTAPLRCPSLSEPFSSCCIGSAGYRTTTTTTGLPTPPVPATLAYTHPALTRSQSVPASTGLGWGSGLVAPLQEGSIDSTLAGTQDTRWGSPTSLEGELGAVAIFHEALQATALRTLCTLGPNETAPFKPEGELHELSTRLLLHYSPQACKNNICLDLSPSHGLDGRLTGHRVETWDVKDVVNCVGGMGALLPLLERVAAQPKEAEAGPAETHDLVGPELTSGHNTQGLVLPLGKSSEERMERNAVAAFLLMLRNFLQGHMVNQESLVQCQGPAIIGALLRKVPSWAMDMNVLMSAQLLMEQVAAEGSGPLLYLLYQHLLFNFHLWTLSDFAVRLGHIQYMSSIVREHRQKLRKKYGVQFILDALRTHYSPQRERPLAADDLRTVQTSLLGLAREFLVRSLSADDVQVTQTMLSFLAATGDDGQAVGALDLLLALLHGSLVQESLAVFLLEPGNLEVLLALLVRPGSLPLLPDRVCKILRRLQQNERLPERSRQRLRLRECGLQGLVACLPEGTVSPQLCQGLYKLFLGADCLNLSDLLAVVQLSLQADLSVRLDICRQLFHLIYGQPDVVRLLARQAGWQDVLTRLYVLEAATAGSPPPSSPESPTSPKPAPPKPPTESPAEPSDVFLPSEAPCPDPDGFYHALSPFCTPFDLGLERSSVGSGNTAGGGGSSGTLTPASQPGTPSPLDGPRPFPAAPGRHSSSLSNVLEDGSLPEPTISGDDTSNTSNPQQTSEEELCNLLTNVLFSVTWRGVEGSDEAAWRERGQVFSVLTQLGASATLVRPPDCIKRSLLEMMLESALTDIKEAPVGVLASLTQQALWLLRLLQDFLCAEGHGNQELWSEKLFEGVCSLLDRLGAWPHLANGTADLREMAQIGLRLVLGYILLEDPQLHAQAYVRLHMLLQTAVPARREEACYVLSKLEAALGRVLNTSSLESATDEAGSPLAAAAAAAAAERCSWLVPLVRTLLDRAYEPLGLQWGLPSLPPTNGSPTFFEDFQAFCATPEWRHFIDKQVQPTMSQFEMDTYAKSHDLMSGFWNACYDMLMSSGQRRQWERAQSRRAFQELVLEPAQRRARLEGLRYTAVLKQQATQHSMALLHWGALWRQLASPCGAWALRDTPIPRWKLSSAETYSRMRLKLVPNHHFDPHLEASALRDNLGEVPLTPTEEASLPLAVTKEAKVSTPPELLQEDQLGEDELAELETPMEAAELDEQREKLVLSAECQLVTVVAVVPGLLEVTTQNVYFYDGSTERVETEEGIGYDFRRPLAQLREVHLRRFNLRRSALELFFIDQANYFLNFPCKVGTTPVSSPSQTPRPQPGPIPPHTQVRNQVYSWLLRLRPPSQGYLSSRSPQEMLRASGLTQKWVQREISNFEYLMQLNTIAGRTYNDLSQYPVFPWVLQDYVSPTLDLSNPAVFRDLSKPIGVVNPKHAQLVREKYESFEDPAGTIDKFHYGTHYSNAAGVMHYLIRVEPFTSLHVQLQSGRFDCSDRQFHSVAAAWQARLESPADVKELIPEFFYFPDFLENQNGFDLGCLQLTNEKVGDVVLPPWASSPEDFIQQHRQALESEYVSAHLHEWIDLIFGYKQRGPAAEEALNVFYYCTYEGAVDLDHVTDERERKALEGIISNFGQTPCQLLKEPHPTRLSAEEAAHRLARLDTNSPSIFQHLDELKAFFAEVVSDGVPLVLALVPHRQPHSFITQGSPDLLVTVSASGLLGTHSWLPYDRNISNYFSFSKDPTMGSHKTQRLLSGPWVPGSGVSGQALAVAPDGKLLFSGGHWDGSLRVTALPRGKLLSQLSCHLDVVTCLALDTCGIYLISGSRDTTCMVWRLLHQGGLSVGLAPKPVQVLYGHGAAVSCVAISTELDMAVSGSEDGTVIIHTVRRGQFVAALRPLGATFPGPIFHLALGSEGQIVVQSSAWERPGAQVTYSLHLYSVNGKLRASLPLAEQPTALTVTEDFVLLGTAQCALHILQLNTLLPAAPPLPMKVAIRSVAVTKERSHVLVGLEDGKLIVVVAGQPSEVRSSQFARKLWRSSRRISQVSSGETEYNPTEAR

SEQ ID NO: 545 - protein, 2627 aa, Homo sapiens
MEKLHGHVSAHPDILSLENRCLAMLPDLQPLEKLHQHVSTHSDILSLKNQCLATLPDLKTMEKPHGYVSAHPDILSLENQCLATLSDLKTMEKPHGHVSAHPDILSLENRCLATLSSLKSTVSASPLFQSLQISHMTQADLYRVNNSNCLLSEPPSWRAQHFSKGLDLSTCPIALKSISATETAQEATLGRWFDSEEKKGAETQMPSYSLSLGEEEEVEDLAVKLTSGDSESHPEPTDHVLQEKKMALLSLLCSTLVSEVNMNNTSDPTLAAIFEICRELALLEPEFILKASLYARQQLNVRNVANNILAIAAFLPACRPHLRRYFCAIVQLPSDWIQVAELYQSLAEGDKNKLVPLPACLRTAMTDKFAQFDEYQLAKYNPRKHRAKRHPRRPPRSPGMEPPFSHRCFPRYIGFLREEQRKFEKAGDTVSEKKNPPRFTLKKLVQRLHIHKPAQHVQALLGYRYPSNLQLFSRSRLPGPWDSSRAGKRMKLSRPETWERELSLRGNKASVWEELIENGKLPFMAMLRNLCNLLRVGISSRHHELILQRLQHAKSVIHSRQFPFRFLNAHDAIDALEAQLRNQALPFPSNITLMRRILTRNEKNRPRRRFLCHLSRQQLRMAMRIPVLYEQLKREKLRVHKARQWKYDGEMLNRYRQALETAVNLSVKHSLPLLPGRTVLVYLTDANADRLCPKSNPQGPPLNYALLLIGMMITRAEQVDVVLCGGDTLKTAVLKAEEGILKTAIKLQAQVQEFDENDGWSLNTFGKYLLSLAGQRVPVDRVILLGQSMDDGMINVAKQLYWQRVNSKCLFVGILLRRVQYLSTDLNPNDVTLSGCTDAILKFIAEHGASHLLEHVGQMDKIFKIPPPPGKTGVQSLRPLEEDTPSPLAPVSQQGWRSIRLFISSTFRDMHGERDLLLRSVLPALQARAAPHRISLHGIDLRWGVTEEETRRNRQLEVCLGEVENAQLFVGILGSRYGYIPPSYNLPDHPHFHWAQQYPSGRSVTEMEVMQFLNRNQRLQPSAQALIYFRDSSFLSSVPDAWKSDFVSESEEAARRISELKSYLSRQKGITCRRYPCEWGGVAAGRPYVGGLEEFGQLVLQDVWNMIQKLYLQPGALLEQPVSIPDDDLVQATFQQLQKPPSPARPRLLQDTVQRLMLPHGRLSLVTGQSGQGKTAFLASLVSALQAPDGAKVASLVFFHFSGARPDQGLALTLLRRLCTYLRGQLKEPGALPSTYRSLVWELQQRLLPKSAESLHPGQTQVLIIDGADRLVDQNGQLISDWIPKKLPRCVHLVLSVSSDAGLGETLEQSQGAHVLALGPLEASARARLVREELALYGKRLEESPFNNQMRLLLVKRESGRPLYLRLVTDHLRLFTLYEQVSERLRTLPATVPLLLQHILSTLEKEHGPDVLPQALTALEVTRSGLTVDQLHGVLSVWRTLPKGTKSWEEAVAAGNSGDPYPMGPFACLVQSLRSLLGEGPLERPGARLCLPDGPLRTAAKRCYGKRPGLEDTAHILIAAQLWKTCDADASGTFRSCPPEALGDLPYHLLQSGNRGLLSKFLTNLHVVAAHLELGLVSRLLEAHALYASSVPKEEQKLPEADVAVFRTFLRQQASILSQYPRLLPQQAANQPLDSPLCHQASLLSRRWHLQHTLRWLNKPRTMKNQQSSSLSLAVSSSPTAVAFSTNGQRAAVGTANGTVYLLDLRTWQEEKSVVSGCDGISACLFLSDDTLFLTAFDGLLELWDLQHGCRVLQTKAHQYQITGCCLSPDCRLLATVCLGGCLKLWDTVRGQLAFQHTYPKSLNCVAFHPEGQVIATGSWAGSISFFQVDGLKVTKDLGAPGASIRTLAFNVPGGVVAVGRLDSMVELWAWREGARLAAFPAHHGFVAAALFLHAGCQLLTAGEDGKVQVWSGSLGRPRGHLGSLSLSPALSVALSPDGDRVAVGYRADGIRIYKISSGSQGAQGQALDVAVSALAWLSPKVLVSGAEDGSLQGWALKECSLQSLWLLSRFQKPVLGLATSQELLASASEDFTVQLWPRQLLTRPHKAEDFPCGTELRGHEGPVSCCSFSTDGGSLATGGRDRSLLCWDVRTPKTPVLIHSFPACHRDWVTGCAWTKDNLLISCSSDGSVGLWDPESGQRLGQFLGHQSAVSAVAAVEEHVVSVSRDGTLKVWDHQGVELTSIPAHSGPISHCAAAMEPRAAGQPGSELLVVTVGLDGATRLWHPLLVCQTHTLLGHSGPVRAAAVSETSGLMLTASEDGSVRLWQVPKEADDTCIPRSSAAVTAVAWAPDGSMAVSGNQAGELILWQEAKAVATAQAPGHIGALIWSSAHTFFVLSADEKISEWQVKLRKGSAPGNLSLHLNRILQEDLGVLTSLDWAPDGHFLILAKADLKLLCMKPGDAPSEIWSSYTENPMILSTHKEYGIFVLQPKDPGVLSFLRQKESGEFEERLNFDINLENPSRTLISITQAKPESESSFLCASSDGILWNLAKCSPEGEWTTGNMWQKKANTPETQTPGTDPSTCRESDASMDSDASMDSEPTPHLKTRQRRKIHSGSVTALHVLPELLVTASKDRDVKLWERPSMQLLGLFRCEGSVSCLEPWLGANSTLQLAVGDVQGNVYFLNWE

SEQ ID NO: 546 - protein, 2146 aa, Homo sapiens
MAFWTQLMLLLWKNFMYRRRQPVQLLVELLWPLFLFFILVAVRHSHPPLEHHECHFPNKPLPSAGTVPWLQGLICNVNNTCFPQLTPGEEPGRLSNFNDSLVSRLLADARTVLGGASAHRTLAGLGKLIATLRAARSTAQPQPTKQSPLEPPMLDVAELLTSLLRTESLGLALGQAQEPLHSLLEAAEDLAQELLALRSLVELRALLQRPRGTSGPLELLSEALCSVRGPSSTVGPSLNWYEASDLMELVGQEPESALPDSSLSPACSELIGALDSHPLSRLLWRRLKPLILGKLLFAPDTPFTRKLMAQVNRTFEELTLLRDVREVWEMLGPRIFTFMNDSSNVAMLQRLLQMQDEGRRQPRPGGRDHMEALRSFLDPGSGGYSWQDAHADVGHLVGTLGRVTECLSLDKLEAAPSEAALVSRALQLLAEHRFWAGVVFLGPEDSSDPTEHPTPDLGPGHVRIKIRMDIDVVTRTNKIRDRFWDPGPAADPLTDLRYVWGGFVYLQDLVERAAVRVLSGANPRAGLYLQQMPYPCYVDDVFLRVLSRSLPLFLTLAWIYSVTLTVKAVVREKETRLRDTMRAMGLSRAVLWLGWFLSCLGPFLLSAALLVLVLKLGDILPYSHPGVVFLFLAAFAVATVTQSFLLSAFFSRANLAAACGGLAYFSLYLPYVLCVAWRDRLPAGGRVAASLLSPVAFGFGCESLALLEEQGEGAQWHNVGTRPTADVFSLAQVSGLLLLDAALYGLATWYLEAVCPGQYGIPEPWNFPFRRSYWCGPRPPKSPAPCPTPLDPKVLVEEAPPGLSPGVSVRSLEKRFPGSPQPALRGLSLDFYQGHITAFLGHNGAGKTTTLSILSGLFPPSGGSAFILGHDVRSSMAAIRPHLGVCPQYNVLFDMLTVDEHVWFYGRLKGLSAAVVGPEQDRLLQDVGLVSKQSVQTRHLSGGMQRKLSVAIAFVGGSQVVILDEPTAGVDPASRRGIWELLLKYREGRTLILSTHHLDEAELLGDRVAVVAGGRLCCCGSPLFLRRHLGSGYYLTLVKARLPLTTNEKADTDMEGSVDTRQEKKNGSQGSRVGTPQLLALVQHWVPGARLVEELPHELVLVLPYTGAHDGSFATLFRELDTRLAELRLTGYGISDTSLEEIFLKVVEECAADTDMEDGSCGQHLCTGIAGLDVTLRLKMPPQETALENGEPAGSAPETDQGSGPDAVGRVQGWALTRQQLQALLLKRFLLARRSRRGLFAQIVLPALFVGLALVFSLIVPPFGHYPALRLSPTMYGAQVSFFSEDAPGDPGRARLLEALLQEAGLEEPPVQHSSHRFSAPEVPAEVAKVLASGNWTPESPSPACQCSRPGARRLLPDCPAAAGGPPPPQAVTGSGEVVQNLTGRNLSDFLVKTYPRLVRQGLKTKKWVNEVRYGGFSLGGRDPGLPSGQELGRSVEELWALLSPLPGGALDRVLKNLTAWAHSLDAQDSLKIWFNNKGWHSMVAFVNRASNAILRAHLPPGPARHAHSITTLNHPLNLTKEQLSEGALMASSVDVLVSICVVFAMSFVPASFTLVLIEERVTRAKHLQLMGGLSPTLYWLGNFLWDMCNYLVPACIVVLIFLAFQQRAYVAPANLPALLLLLLLYGWSITPLMYPASFFFSVPSTAYVVLTCINLFIGINGSMATFVLELFSDQKLQEVSRILKQVFLIFPHFCLGRGLIDMVRNQAMADAFERLGDRQFQSPLRWEVVGKNLLAMVIQGPLFLLFTLLLQHRSQLLPQPRVRSLPLLGEEDEDVARERERVVQGATQGDVLVLRNLTKVYRGQRMPAVDRLCLGIPPGECFGLLGVNGAGKTSTFRMVTGDTLASRGEAVLAGHSVAREPSAAHLSMGYCPQSDAIFELLTGREHLELLARLRGVPEAQVAQTAGSGLARLGLSWYADRPAGTYSGGNKRKLATALALVGDPAVVFLDEPTTGMDPSARRFLWNSLLAVVREGRSVMLTSHSMEECEALCSRLAIMVNGRFRCLGSPQHLKGRFAAGHTLTLRVPAARSQPAAAFVAAEFPGAELREAHGGRLRFQLPPGGRCALARVFGELAVHGAEHGVEDFSVSQTMLEEVFLYFSKDQGKDEDTEEQKEAGVGVDPAPGLQHPKRVSQFLDDPSTAETVL

SEQ ID NO: 547 - protein, 294 aa, Homo sapiens
MEDSMDMDMSPLRPQNYLFGCELKADKDYHFKVDNDENEHQLSLRTVSLGAGAKDELHIVEAEAMNYEGSPIKVTLATLKMSVQPTVSLGGFEITPPVVLRLKCGSGPVHISGQHLVAVEEDAESEDEEEEDVKLLSISGKRSAPGGGSKVPQKKVKLAADEDDDDDDEEDDDEDDDDDDFDDEEAEEKAPVKKSIRDTPAKNAQKSNQNGKDSKPSSTPRSKGQESFKKQEKTPKTPKGPSSVEDIKAKMQASIEKGGSLPKVEAKFINYVKNCFRMTDQEAIQDLWQWRKSL

SEQ ID NO: 548 - protein, 1911 aa, Homo sapiens [sequence omitted]

SEQ ID NO: 549 - protein, 1717 aa, Homo sapiens
MEPAAAATVQRLPELGREDRASAPAAAAAAAAAAAAAAAALAAAAGGGRSPEPALTPAAPSGGNGSGSGAREEAPGEAPPGPLPGRAGGAGRRRRRGAPQPIAGGAAPVPGAGGGANSLLLRRGRLKRNLSAAAAAASSSSSSSAAAASHSPGAAGLPASCSASASLCTRSLDRKTLLLKHRQTLQLQPSDRDWVRHQLQRGCVHVFDRHMASTYLRPVLCTLDTTAGEVAARLLQLGHKGGGVVKVLGQGPGAAAAREPAEPPPEAGPRLAPPEPRDSEVPPARSAPGAFGGPPRAPPADLPLPVGGPGGWSRRASPAPSDSSPGEPFVGGPVSSPRAPRPVVSDTESFSLSPSAESVSDRLDPYSSGGGSSSSSEELEADAASAPTGVPGQPRRPGHPAQPLPLPQTASSPQPQQKAPRAIDSPGGAVREGSCEEKAAAAVAPGGLQSTPGRSGVTAEKAPPPPPPPTLYVQLHGETTRRLEAEEKPLQIQNDYLFQLGFGELWRVQEEGMDSEIGCLIRFYAGKPHSTGSSERIQLSGMYNVRKGKMQLPVNRWTRRQVILCGTCLIVSSVKDSLTGKMHVLPLIGGKVEEVKKHQHCLAFSSSGPQSQTYYICFDTFTEYLRWLRQVSKVASQRISSVDLSCCSLEHLPANLFYSQDLTHLNLKQNFLRQNPSLPAARGLNELQRFTKLKSLNLSNNHLGDFPLAVCSIPTLAELNVSCNALRSVPAAVGVMHNLQTFLLDGNFLQSLPAELENMKQLSYLGLSFNEFTDIPEVLEKLTAVDKLCMSGNCVETLRLQALRKMPHIKHVDLRLNVIRKLIADEVDFLQHVTQLDLRDNKLGDLDAMIFNNIEVLHCERNQLVTLDICGYFLKALYASSNELVQLDVYPVPNYLSYMDVSRNRLENVPEWVCESRKLEVLDIGHNQICELPARLFCNSSLRKLLAGHNQLARLPERLERTSVEVLDVQHNQLLELPPNLLMKADSLRFLNASANKLESLPPATLSEETNSILQELYLTNNSLTDKCVPLLTGHPHLKILHMAYNRLQSFPASKMAKLEELEEIDLSGNKLKAIPTTIMNCRRMHTVIAHSNCIEVFPEVMQLPEIKCVDLSCNELSEVTLPENLPPKLQELDLTGNPRLVLDHKTLELLNNIRCFKIDQPSTGDASGAPAVWSHGYTEASGVKNKLCVAALSVNNFCDNREALYGVFDGDRNVEVPYLLQCTMSDILAEELQKTKNEEEYMVNTFIVMQRKLGTAGQKLGGAAVLCHIKHDPVDPGGSFTLTSANVGKCQTVLCRNGKPLPLSRSYIMSCEEELKRIKQHKAIITEDGKVNGVTESTRILGYTFLHPSVVPRPHVQSVLLTPQDEFFILGSKGLWDSLSVEEAVEAVRNVPDALAAAKKLCTLAQSYGCHDSISAVVVQLSVTEDSFCCCELSAGGAVPPPSPGIFPPSVNMVIKDRPSDGLGVPSSSSGMASEISSELSTSEMSSEVGSTASDEPPPGALSENSPAYPSEQRCMLHPICLSNSFQRQLSSATFSSAFSDNGLDSDDEEPIEGVFTNGSRVEVEVDIHCSRAKEKEKQQHLLQVPAEASDEGIVISANEDEPGLPRKADFSAVGTIGRRRANGSVAPQERSHNVIEVATDAPLRKPGGYFAAPAQPDPDDQFIIPPELEEEVKEIMKHHQEQQQQQQPPPPPQLQPQLPRHYQLDQLPDYYDTPL

SEQ ID NO: 550 - protein, 1183 aa, Homo sapiens
MGNAPSQDPERSSPPMLSADDAEYPREYRTLGGGGGGGSGGRRFSNVGLVHTSERRHTVIAAQSLEALSGLQKADADRKRDAFMDHLKSKYPQHALALRGQQDRMREQPNYWSFKTRSSRHTQGAQPGLADQAAKLSYASAESLETMSEAELPLGFSRMNRFRQSLPLSRSASQTKLRSPGVLFLQFGEETRRVHITHEVSSLDTLHALIAHMFPQKLTMGMLKSPNTAILIKDEARNVFYELEDVRDIQDRSIIKIYRKEPLYAAFPGSHLTNGDLRREMVYASRESSPTRRLNNLSPAPHLASGSPPPGLPSGLPSGLQSGSPSRSRLSYAGGRPPSYAGSPVHHAAERLGGAPAAQGVSPSPSAILERRDVKPDEDLASKAGGMVLVKGEGLYADPYGLLHEGRLSLAAAAGDPFAYPGAGGLYKRGSVRSLSTYSAAALQSDLEDSLYKAAGGGGPLYGDGYGFRLPPSSPQKLADVAAPPGGPPPPHSPYSGPPSRGSPVRQSFRKDSGSSSVFAESPGGKTRSAGSASTAGAPPSELFPGPGERSLVGFGPPVPAKDTETRERMEAMEKQIASLTGLVQSALLRGSEPETPSEKIEGSNGAATPSAPCGSGGRSSGATPVSGPPPPSASSTPAGQPTAVSRLQMQLHLRGLQNSASDLRGQLQQLRKLQLQNQESVRALLKRTEAELSMRVSEAARRQEDPLQRQRTLVEEERLRYLNDEELITQQLNDLEKSVEKIQRDVSHNHRLVPGPELEEKALVLKQLGETLTELKAHFPGLQSKMRVVLRVEVEAVKFLKEEPQRLDGLLKRCRGVTDTLAQIRRQVDEGVWPPPNNLLSQSPKKVTAETDFNKSVDFEMPPPSPPLNLHELSGPAEGASLTPKGGNPTKGLDTPGKRSVDKAVSVEAAERDWEEKRAALTQYSAKDINRLLEETQAELLKAIPDLDCASKAHPGPAPTPDHKPPKAPHGQKAAPRTEPSGRRGSDELTVPRYRTEKPSKSPPPPPPRRSFPSSHGLTTTRTGEVVVTSKKDSAFIKKAESEELEVQKPQVKLRRAVSEVARPASTPPIMASAIKDEDDEDRIIAELESGGGSVPPMKVVTPGASRLKAAQGQAGSPDKSKHGKQRAEYMRIQAQQQATKPSKEMSGSNETSSPVSEKPSASRTSIPVLTSFGARNSSISF

SEQ ID NO: 551 - protein, 3088 aa, Homo sapiens
MEEFLQRAKSKLNRSKRLEKVHVVIGPKSCDLDSLISTFTYAYFLDKVSPPGVLCLPVLNIPRTEFNYFTETRFILEELNISESFHIFRDEINLHQLNDEGKLSITLVGSSVLASEDKTLESAVVKVINPVEQSDANVEFRESSSSLVLKEILQEAPELITEQLAHRLRGSILFKWMTMESEKISEKQEEILSILEEKFPNLPPREDIINVLQETQFSAQGLSIEQTMLKDLKELSDGEIKVAISTVSMNLENCLFHSNITSDLKAFTDKFGFDVLILFSSYLSEEQQPRRQIAVYSENMELCSQICCELEECQNPCLELEPFDCGCDEILVYQQEDPSVTCDQVVLVVKEVINRRCPEMVSNSRTSSTEAVAGSAPLSQGSSGIMELYGSDIEPQPSSVNFIENPPDLNDSNQAQVDANVDLVSPDSGLATIRSSRSSKESSVFLSDDSPVGEGAGPHHTLLPGLDSYSPIPEGAVAEEHAWSGEHGEHFDLFNFDPAPMASGQSQQSSHSADYSPADDFFPNSDLSEGQLPAGPEGLDGMGTNMSNYSSSSLLSGAGKDSLVEHDEEFVQRQDSPRDNSERNLSLTDFVGDESPSPERLKNTGKRIPPTPMNSLVESSPSTEEPASLYTEDMTQKATDTGHMGPPQTHARCSSWWGGLEIDSKNIADAWSSSEQESVFQSPESWKEHKPSSIDRRASDSVFQPKSLEFTKSGPWESEFGQPELGSNDIQDKNEESLPFQNLPMEKSPLPNTSPQGTNHLIEDFASLWHSGRSPTAMPEPWGNPTDDGEPAAVAPFPAWSAFGKEDHDEALKNTWNLHPTSSKTPSVRDPNEWAMAKSGFAFSSSELLDNSPSEINNEAAPEIWGKKNNDSRDHIFAPGNPSSDLDHTWTNSKPPKEDQNGLVDPKTRGKVYEKVDSWNLFEENMKKGGSDVLVPWEDSFLSYKCSDYSASNLGEDSVPSPLDTNYSTSDSYTSPTFAGDEKETEHKPFAKEEGFESKDGNSTAEETDIPPQSLQQSSRNRISSGPGNLDMWASPHTDNSSEINTTHNLDENELKTEHTDGKNISMEDDVGESSQSSYDDPSMMQLYNETNRQLTLLHSSTNSRQTAPDSLDLWNRVILEDTQSTATISDMDNDLDWDDCSGGAAIPSDGQTEGYMAEGSEPETRFTVRQLEPWGLEYQEANQVDWELPASDEHTKDSAPSEHHTLNEKSGQLIANSIWDSVMRDKDMSSFMLPGSSHITDSEQRELPPEIPSHSANVKDTHSPDAPAASGTSESEALISHLDKQDTERETLQSDAASLATRLENPGYFPHPDPWKGHGDGQSESEKEAQGATDRGHLDEEEVIASGVENASGISEKGQSDQELSSLVASEHQEICIKSGKISSLAVTFSPQTEEPEEVLEYEEGSYNLDSRDVQTGMSADNLQPKDTHEKHLMSQRNSGETTETSDGMNFTKYVSVPEKDLEKTEECNFLEPENVGGGPPHRVPRSLDFGDVPIDSDVHVSSTCSEITKNLDVKGSENSLPGAGSSGNFDRDTISSEYTHSSASSPELNDSSVALSSWGQQPSSGYQEENQGNWSEQNHQESELITTDGQVEIVTKVKDLEKNRINEFEKSFDRKTPTFLEIWNDSVDGDSFSSLSSPETGKYSEHSGTHQESNLIASYQEKNEHDISATVQPEDARVISTSSGSDDDSVGGEESIEEEIQVANCHVAEDESRAWDSLNESNKFLVTADPKSENIYDYLDSSEPAENENKSNPFCDNQQSSPDPWTFSPLTETEMQITAVEKEKRSSPETGTTGDVAWQISPKASFPKNEDNSQLEMLGFSADSTEWWKASPQEGRLIESPFERELSDSSGVLEINSSVHQNASPWGVPVQGDIEPVETHYTNPFSDNHQSPFLEGNGKNSHEQLWNIQPRQPDPDADKFSQLVKLDQIKEKDSREQTFVSAAGDELTPETPTQEQCQDTMLPVCDHPDTAFTHAEENSCVTSNVSTNEGQETNQWEQEKSYLGEMTNSSIATENFPAVSSPTQLIMKPGSEWDGSTPSEDSRGTFVPDILHGNFQEGGQLASAAPDLWIDAKKPFSLKADGENPDILTHCEHDSNSQASDSPDICHDSEAKQETEKHLSACMGPEVESSELCLTEPEIDEEPIYEPGREFVPSNAELDSENATVLPPIGYQADIKGSSQPASHKGSPEPSEINGDNSTGLQVSEKGASPDMAPILEPVDRRIPRIENVATSIFVTHQEPTPEGDGSWISDSFSPESQPGARALFDGDPHLSTENPALVPDALLASDTCLDISEAAFDHSFSDASGLNTSTGTIDDMSKLTLSEGHPETPVDGDLGKQDICSSEASWGDFEYDVMGQNIDEDLLREPEHFLYGGDPPLEEDSLKQSLAPYTPPFDLSYLTEPAQSAETIEEAGSPEDESLGCRAAEIVLSALPDRRSEGNQAETKNRLPGSQLAVLHIREDPESVYLPVGAGSNILSPSNVDWEVETDNSDLPAGGDIGPPNGASKEISELEEEKTIPTKEPEQIKSEYKEERCTEKNEDRHALHMDYILVNREENSHSKPETCEERESIAELELYVGSKETGLQGTQLASFPDTCQPASLNERKGLSAEKMSSKSDTRSSFESPAQDQSWMFLGHSEVGDPSLDARDSGPGWSGKTVEPFSELGLGEGPQLQILEEMKPLESLALEEASGPVSQSQKSKSRGRAGPDAVTLQAVTHDNEWEMLSPQPVQKNMIPDTEMEEETEFLELGTRISRPNGLLSEDVGMDIPFEEGVLSPSAADMRPEPPNSLDLNDTHPRRIKLTAPNINLSLDQSEGSILSDDNLDSPDEIDINVDELDTPDEADSFEYTGHDPTANKDSGQESESIPEYTAEEEREDNRLWRTVVIGEQEQRIDMKVIEPYRRVISHGGYYGDGLNAIIVFAACFLPDSSRADYHYVMENLFLYVISTLELMVAEDYMIVYLNGATPRRRMPGLGWMKKCYQMIDRRLRKNLKSFIIVHPSWFIRTILAVTRPFISSKFSSKIKYVNSLSELSGLIPMDCIHIPESIIKLDEELREASEAAKTSCLYNDPEMSSMEKDIDLKLKEKP

SEQ ID NO: 552 - protein, 1871 aa, Homo sapiens
MANLEESFPRGGTRKIHKPEKAFQQSVEQDNLFDISTEEGSTKRKKSQKGPAKTKKLKIEKRESSKSAREKFEILSVESLCEGMRILGCVKEVNELELVISLPNGLQGFVQVTEICDAYTKKLNEQVTQEQPLKDLLHLPELFSPGMLVRCVVSSLGITDRGKKSVKLSLNPKNVNRVLSAEALKPGMLLTGTVSSLEDHGYLVDIGVDGTRAFLPLLKAQEYIRQKNKGAKLKVGQYLNCIVEKVKGNGGVVSLSVGHSEVSTAIATEQQSWNLNNLLPGLVVKAQVQKVTPFGLTLNFLTFFTGVVDFMHLDPKKAGTYFSNQAVRACILCVHPRTRVVHLSLRPIFLQPGRPLTRLSCQNLGAVLDDVPVQGFFKKAGATFRLKDGVLAYARLSHLSDSKNVFNPEAFKPGNTHKCRIIDYSQMDELALLSLRTSIIEAQYLRYHDIEPGAVVKGTVLTIKSYGMLVKVGEQMRGLVPPMHLADILMKNPEKKYHIGDEVKCRVLLCDPEAKKLMMTLKKTLIESKLPVITCYADAKPGLQTHGFIIRVKDYGCIVKFYNNVQGLVPKHELSTEYIPDPERVFYTGQVVKVVVLNCEPSKERMLLSFKLSSDPEPKKEPAGHSQKKGKAINIGQLVDVKVLEKTKDGLEVAVLPHNIRAFLPTSHLSDHVANGPLLHHWLQAGDILHRVLCLSQSEGRVLLCRKPALVSTVEGGQDPKNFSEIHPGMLLIGFVKSIKDYGVFIQFPSGLSGLAPKAIMSDKFVTSTSDHFVEGQTVAAKVTNVDEEKQRMLLSLRLSDCGLGDLAITSLLLLNQCLEELQGVRSLMSNRDSVLIQTLAEMTPGMFLDLVVQEVLEDGSVVFSGGPVPDLVLKASRYHRAGQEVESGQKKKVVILNVDLLKLEVHVSLHQDLVNRKARKLRKGSEHQAIVQHLEKSFAIASLVETGHLAAFSLTSHLNDTFRFDSEKLQVGQGVSLTLKTTEPGVTGLLLAVEGPAAKRTMRPTQKDSETVDEDEEVDPALTVGTIKKHTLSIGDMVTGTVKSIKPTHVVVTLEDGIIGCIHASHILDDVPEGTSPTTKLKVGKTVTARVIGGRDMKTFKYLPISHPRFVRTIPELSVRPSELEDGHTALNTHSVSPMEKIKQYQAGQTVTCFLKKYNVVKKWLEVEIAPDIRGRIPLLLTSLSFKVLKHPDKKFRVGQALRATVVGPDSSKTLLCLSLTGPHKLEEGEVAMGRVVKVTPNEGLTVSFPFGKIGTVSIFHMSDSYSETPLEDFVPQKVVRCYILSTADNVLTLSLRSSRTNPETKSKVEDPEINSIQDIKEGQLLRGYVGSIQPHGVFFRLGPSVVGLARYSHVSQHSPSKKALYNKHLPEGKLLTARVLRLNHQKNLVELSFLPGDTGKPDVLSASLEGQLTKQEERKTEAEERDQKGEKKNQKRNEKKNQKGQEEVEMPSKEKQQPQKPQAQKRGGRECRESGSEQERVSKKPKKAGLSEEDDSLVDVYYREGKEEAEETNVLPKEKQTKPAEAPRLQLSSGFAWNVGLDSLTPALPPLAESSDSEEDEKPHQATIKKSKKERELEKQKAEKELSRIEEALMDPGRQPESADDFDRLVLSSPNSSILWLQYMAFHLQATEIEKARAVAERALKTISFREEQEKLNVWVALLNLENMYGSQESLTKVFERAVQYNEPLKVFLHLADIYAKSEKFQEAGELYNRMLKRFRQEKAVWIKYGAFLLRRSQAAASHRVLQRALECLPSKEHVDVIAKFAQLEFQLGDAERAKAIFENTLSTYPKRTDVWSVYIDMTIKHGSQKDVRDIFERVIHLSLAPKRMKFFFKRYLDYEKQHGTEKDVQAVKAKALEYVEAKSSVLED

SEQ ID NO: 553 - protein, 2090 aa, Homo sapiens
MGDEMDAMIPEREMKDFQFRALKKVRIFDSPEELPKERSSLLAVSNKYGLVFAGGASGLQIFPTKNLLIQNKPGDDPNKIVDKVQGLLVPMKFPIHHLALSCDNLTLSACMMSSEYGSIIAFFDVRTFSNEAKQQKRPFAYHKLLKDAGGMVIDMKWNPTVPSMVAVCLADGSIAVLQVTETVKVCATLPSTVAVTSVCWSPKGKQLAVGKQNGTVVQYLPTLQEKKVIPCPPFYESDHPVRVLDVLWIGTYVFAIVYAAADGTLETSPDVVMALLPKKEEKHPEIFVNFMEPCYGSCTERQHHYYLSYIEEWDLVLAASAASTEVSILARQSDQINWESWLLEDSSRAELPVTDKSDDSLPMGVVVDYTNQVEITISDEKTLPPAPVLMLLSTDGVLCPFYMINQNPGVKSLIKTPERLSLEGERQPKSPGSTPTTPTSSQAPQKLDASAAAAPASLPPSSPAAPIATFSLLPAGGAPTVFSFGSSSLKSSATVTGEPPSYSSGSDSSKAAPGPGPSTFSFVPPSKASLAPTPAASPVAPSAASFSFGSSGFKPTLESTPVPSVSAPNIAMKPSFPPSTSAVKVNLSEKFTAAATSTPVSSSQSAPPMSPFSSASKPAASGPLSHPTPLSAPPSSVPLKSSVLPSPSGRSAQGSSSPVPSMVQKSPRITPPAAKPGSPQAKSLQPAVAEKQGHQWKDSDPVMAGIGEEIAHFQKELEELKARTSKACFQVGTSEEMKMLRTESDDLHTFLLEIKETTESLHGDISSLKTTLLEGFAGVEEAREQNERNRDSGYLHLLYKRPLDPKSEAQLQEIRRLHQYVKFAVQDVNDVLDLEWDQHLEQKKKQRHLLVPERETLFNTLANNREIINQQRKRLNHLVDSLQQLRLYKQTSLWSLSSAVPSQSSIHSFDSDLESLCNALLKTTIESHTKSLPKVPAKLSPMKQAQLRNFLAKRKTPPVRSTAPASLSRSAFLSQRYYEDLDEVSSTSSVSQSLESEDARTSCKDDEAVVQAPRHAPVVRTPSIQPSLLPHAAPFAKSHLVHGSSPGVMGTSVATSASKIIPQGADSTMLATKTVKHGAPSPSHPISAPQAAAAAALRRQMASQAPAVNTLTESTLKNVPQVVNVQELKNNPATPSTAMGSSVPYSTAKTPHPVLTPVAANQAKQGSLINSLKPSGPTPASGQLSSGDKASGTAKIETAVTSTPSASGQFSKPFSFSPSGTGFNFGIITPTPSSNFTAAQGATPSTKESSQPDAFSSGGGSKPSYEAIPESSPPSGITSASNTTPGEPAASSSRPVAPSGTALSTTSSKLETPPSKLGELLFPSSLAGETLGSFSGLRVGQADDSTKPTNKASSTSLTSTQPTKTSGVPSGFNFTAPPVLGKHTEPPVTSSATTTSVAPPAATSTSSTAVFGSLPVTSAGSSGVISFGGTSLSAGKTSFSFGSQQTNSTVPPSAPPPTTAATPLPTSFPTLSFGSLLSSATTPSLPMSAGRSTEEATSSALPEKPGDSEVSASAASLLEEQQSAQLPQAPPQTSDSVKKEPVLAQPAVSNSGTAASSTSLVALSAEATPATTGVPDARTEAVPPASSFSVPGQTAVTAAAISSAGPVAVETSSTPIASSTTSIVAPGPSAEAAAFGTVTSGSSVFAQPPAASSSSAFNQLTNNTATAPSATPVFGQVAASTAPSLFGQQTGSTASTAAATPQVSSSGFSSPAFGTTAPGVFGQTTFGQASVFGQSASSAASVFSFSQPGFSSVPAFGQPASSTPTSTSGSVFGAASSTSSSSSFSFGQSSPNTGGGLFGQSNAPAFGQSPGFGQGGSVFGGTSAATTTAATSGFSFCQASGFGSSNTGSVFGQAASTGGIVFGQQSSSSSGSVFGSGNTGRGGGFFSGLGGKPSQDAANKNPFSSASGGFGSTATSNTSNLFGNSGAKTFGGFASSSFGEQKPTGTFSSGGGSVASQGFGFSSPNKTGGFGAAPVFGSPPTFGGSPGFGGVPAFGSAPAFTSPLGSTGGKVFGEGTAAASAGGFGFGSSSNTTSFGTLASQNAPTFGSLSQQTSGFGTQSSGFSGFGSGTGGFSFGSNNSSVQGFGGWRS

SEQ ID NO: 554 - protein, 1701 aa, Homo sapiens
MRGGENRPPARVQSSSEELELRHQSLDAFPGRRLPGRGIQPAAKMSSVGKVTQVPNGKAYQQIFQAEVQLVHSLAATRKRAAERSVTLKSGRIPMMKKVETPEGEVMSPRQQKWMHSLPNDWIMENPVLHREKERAKREKARESENTIAAREVRGLMDTIVPEKISTSTFQRQAEHKRKSYESALASFQEEIAQVGKEMEPLIVDTGGLFLKKLTESDEEMNRLFLKVENDTNLEDYTIQALLELWDKVAGRLLLRKQEIKELDEALHSLEFSRTDKLKSVLKKYAEVIEKTSYLMRPEVYRLINEEAMVMNYALLGNRKALAQLFVNLMESTLQQELDSRHRWQGLVDTWKALKKEALLQSFSEFMASESIHTPPAVTKELEVMLKTQNVLQQRRLKHLCTICDLLPPSYSKTQLTEWHSSLNSLNKELDTYHVDCMMRIRLLYEKTWQECLMHVQNCKKQLLDWKAFTEEEAETLVNQFFFQMVGALQGKVEEDLELLDKSFETLADQTEWQSSHLFKYFQEVVQLWEAHQSELLVQELELEKRMEQHRQKHSLESQVQEAHLDRLLDQLRQQSDKETLAFHLEKVKDYLKNMKSRYECFHTLLTKEVMEYPAIMLKELNSYSSALSQYFFVREIFEQNLAGEVIFKFRQPEAHEKPSQKRVKKLRKKQGSKEDMTRSEESISSGTSTARSVEEVEEENDQEMESFITEEVLGQQKKSPLHAKMDESKEGSIQGLEEMQVEREGSLNPSLNEENVKGQGEKKEESEEEDEKEEEEEEEKLEEEKEEKEAQEEQESLSVGEEEDKEEGLEEIYYEDMESFTISSGNTYFVFVPLEEEHCRKSHSTFSAMFINDTSSAKFIEQVTIPSRLILEIKKQLRAGFFEHLEKWFDQCSLNTRVTVATKINELDSELELHLHLHQPRAQQIEKDIHNVRAAELLLHQEQLDSHCAGVTETLKKKRLMFCQFQEEQNVRSKNFRLKIYDMEHIFLNATRSQKLVTLSNTLHQELLSYVDVTQVSLRSFRQYLEESLGKLRYSNIEFIKHCRLFSEGGNFSPKEINSLCSRLEKEAARIELVESVIMLNMEKLENEYLDQANDVINKFESKFHNLSVDLIFIEKIQRLLTNLQVKIKCQVAKSNSQTNGLNFSLQQLQNKIKTCQESRGEKTTVTTEELLSFVQTWKEKLSQRIQYLNCSLDRVSMTELVFTNTILKDQEEDSDILTSSEALEEEAKLDVVTPESFTQLSRVGKPLIEDPAVDVIRKLLQLPNTKWPTHHCDKDPSQTGRGAWACGSRGSSEAGAGGAVCSPPVLCSCPGPSSPKGFKRHRCQPENSGKKAVPSASATSAGSFTPHPKPNKMERKYRVLGDKPPPAAEDFKGIILTLLWESSENLLTVAEEFYRKEKRPVTRPDCMCDTFDQCAENISKKILEYQSQANKYHNSCLIELRIQIRRFEELLPQVCWLVMENFKEHHWKKFFTSVKEIRGQFEEQQKRLEKRKDKNAQKLHLNLGHPVHFQEMESLHLSEEERQEELDSMIRMNKEKLEECTRRNGQVFITNLATFTEKFLLQLDEVVTIDDVQVARMEPPKQKLSMLIRRKLAGLSLKEESEKPLIERGSRKWPGIKPTEVTIQNKILLQPTSSISTTKTTLGHLAAVEARDAVYLKYLASFEEELKRIQDDCTSQIKEAQRWKDSWKQSLHTIQGLYV

SEQ ID NO: 555 - protein, 201 aa, Homo sapiens
MALSWVLTVLSLLPLLEAQIPLCANLVPVPITNATLDRITGKWFYIASAFRNEEYNKSVQEIQATFFYFTPNKTEDTIFLREYQTRQDQCIYNTTYLNVQRENGTISRYVGGQEHFAHLLILRDTKTYMLAFDVNDEKNWGLSVYADKPETTKEQLGEFYEALDCLRIPKSDVVYTDWKKDKCEPLEKQHEKERKQEEGES

SEQ ID NO: 556 - protein, 1326 aa, Homo sapiens
MNLNTSSNTGDTQRLKIASLDVKQILKNETELDITDNLRKKLHWAKKEKLEITTKHNAELASYESQIAKLRSEVEKGEALRQSLEYDLAVARKEAGLGRRAAEERLAEAHRIQEKLCAQNSELQAKTNETEKAFQTSQQKWKEECRRFEHDLEERDNMIQNCNREYDLLMKEKSRLEKTLQEALEKHQREKNEMESHIRETALEEFRLQEEQWEAERRELQFIVQEQDTAVQNMHKKVEKLETEHMDCSDLLRRQTSELEFSTQREERLRKEFEATTLRVRKLEENIEAERAAHLESKFNSEIIQLRIRDLEGALQVEKASQAEAVADLEIIKNEFKEVESAYEREKHNAQESFAKLNLLEKEYFSKNKKLNEDIEEQKKVIIDLSKRLQYNEKSCSELQEELVMAKKHQAFLVETCENNVKELESILDSFTVSGQWTSGIHKDKDKPPSFSVVLERLRRTLTDYQNKLEDASNEEKACNELDSTKQKIDSHTKNIKELQDKLADVNKELSHLHTKCADREALISTLKVELQNVLHCWEKEKAQAAQSESELQKLSQAFHKDAEEKLTFLHTLYQHLVAGCVLIKQPEGMLDKFSWSELCAVLQENVDALIADLNRANEKIRHLEYICKNKSDTMRELQQTQEDTFTKVAEQIKAQESCWHRQKKELELQYSELFLEVQKRAQKFQEIAEKNMEKLNHIEKSHEQLVLENSHFKKLLSQTQREQMSLLAACALMAGALYPLYSRSCALSTQRDFLQEQVNTFELFKLEIRTLAQALSTVEEKKQEEAKMKKKTFKGLIRIFRKGVIAVLAANRLKILGQSCASLFTWMESFKEGIGMLVCTGEPQDKHKFPKHQKEQLRCLQALSWLTSSDLLAAIISSMAELQDVIGKADPNSRICGHLLIGAAKNSFAKLMDKISLVMECIPLHSSRSITYVEKDSLVQRLAHGLHKVNTLALKYGLRGHVPITKSTASLQKQILGFTQRLHAAEVERRSLRLEVTEFKRSVNEMKKELDKAQGLQMQLNEFKQSKLITHEKFESACEELNNALLREEQAQMLLNEQAQQLQELNYKLELHSSEEADKNQTLGEAVKSLSEAKMELRRKDQSLRQLNRHLTQLEQDKRRLEENIHDAESALRMAAKDKECVANHMRAVENTLHKVRDQISLSWSAASRNDFTLQLPKLHLETFAMEGLKGGPEVVACQAMIKSFMDVYQLASTRIMTLEKEMTSHRSHIAALKSELHTACLRENASLQSIGSRDHSNLSIPSRAPLPADTTGIGDFLPLKAELDTTYTFLKETFINTVPHALTSSHSSPVTMSANANRPTQIGL

SEQ ID NO: 557 - protein, 1288 aa, Homo sapiens
MPRKGTQPSTARRREEGPPPPSPDGASSDAEPEPPSGRTESPATAAETASEELDNRSLEEILNSIPPPPPPAMTNEAGAPRLMITHIVNQNFKSYAGEKILGPFHKRFSCIIGPNGSGKSNVIDSMLFVFGYRAQKIRSKKLSVLIHNSDEHKDIQSCTVEVHFQKIIDKEGDDYEVIPNSNFYVSRTACRDNTSVYHISGKKKTFKDVGNLLRSHGIDLDHNRFLILQGEVEQIAMMKPKGQTEHDEGMLEYLEDIIGCGRLNEPIKVLCRRVEILNEHRGEKLNRVKMVEKEKDALEGEKNIAIEFLTLENEIFRKKNHVCQYYIYELQKRIAEMETQKEKIHEDTKEINEKSNILSNEMKAKNKDVKDTEKKLNKITKFIEENKEKFTQLDLEDVQVREKLKHATSKAKKLEKQLQKDKEKVEEFKSIPAKSNNIINETTTRNNALEKEKEKEEKKLKEVMDSLKQETQGLQKEKESREKELMGFSKSVNEARSKMDVAQSELDIYLSRHNTAVSQLTKAKEALIAASETLKERKAAIRDIEGKLPQTEQELKEKEKELQKLTQEETNFKSLVHDLFQKVEEAKSSLAMNRSRGKVLDAIIQEKKSGRIPGIYGRLGDLGAIDEKYDVAISSCCHALDYIVVDSIDIAQECVNFLKRQNIGVATFIGLDKMAVWAKKMTEIQTPENTPRLFDLVKVKDEKIRQAFYFALRDTLVADNLDQATRVAYQKDRRWRVVTLQGQIIEQSGTMTGGGSKVMKGRMGSSLVIEISEEEVNKMESQLQNDSKKAMQIQEQKVQLEERVVKLRHSEREMRNTLEKFTASIQRLIEQEEYLNVQVKELEANVLATAPDKKKQKLLEENVSAFKTEYDAVAEKAGKVEAEVKRLHNTIVEINNHKLKAQQDKLDKINKQLDECASAITKAQVAIKTADRNLQKAQDSVLRTEKEIKDTEKEVDDLTAELKSLEDKAAEVVKNTNAAEESLPEIQKEHRNLLQELKVIQENEHALQKDALSIKLKLEQIDGHIAEHNSKIKYWHKEISKISLHPIEDNPIEEISVLSPEDLEAIKNPDSITNQIALLEARCHEMKPNLGAIAEYKKKEELYLQRVAELDKITYERDSFRQAYEDLRKQRLNEFMAGFYIITNKLKENYQMLTLGGDAELELVDSLDPFSEGIMFSVRPPKKSWKKIFNLSGGEKTLSSLALVFALHHYKPTPLYFMDEIDAALDFKNVSIVAFYIYEQTKNAQFIIISLRNNMFEISDRLIGIYKTYNITKSVAVNPKEIASKGLC

SEQ ID NO: 558 - protein, 2590 aa, Homo sapiens
MNLLRRSGKRRRSESGSDSFSGSGGDSSASPQFLSGSVLSPPPGLGRCLKAAAAGECKPTVPDYERDKLLLANWGLPKAVLEKYHSFGVKKMFEWQAECLLLGQVLEGKNLVYSAPTSAGKTLVAELLILKRVLEMRKKALFILPFVSVAKEKKYYLQSLFQEVGIKVDGYMGSTSPSRHFSSLDIAVCTIERANGLINRLIEENKMDLLGMVVVDELHMLGDSHRGYLLELLLTKICYITRKSASCQADLASSLSNAVQIVGMSATLPNLELVASWLNAELYHTDFRPVPLLESVKVGNSIYDSSMKLVREFEPMLQVKGDEDHVVSLCYETICDNHSVLLFCPSKKWCEKLADIIAREFYNLHHQAEGLVKPSECPPVILEQKELLEVMDQLRRLPSGLDSVLQKTVPWGVAFHHAGLTFEERDIIEGAFRQGLIRVLAATSTLSSGVNLPARRVIIRTPIFGGRPLDILTYKQMVGRAGRKGVDTVGESILICKNSEKSKGIALLQGSLKPVRSCLQRREGEEVTGSMIRAILEIIVGGVASTSQDMHTYAACTFLAASMKEGKQGIQRNQESVQLGAIEACVMWLLENEFIQSTEASDGTEGKVYHPTHLGSATLSSSLSPADTLDIFADLQRAMKGFVLENDLHILYLVTPMFEDWTTIDWYRFFCLWEKLPTSMKRVAELVGVEEGFLARCVKGKVVARTERQHRQMAIHKRFFTSLVLLDLISEVPLREINQKYGCNRGQIQSLQQSAAVYAGMITVFSNRLGWHNMELLLSQFQKRLTFGIQRELCDLVRVSLLNAQRARVLYASGFHTVADLARANIVEVEVILKNAVPFKSARKAVDEEEEAVEERRNMRTIWVTGRKGLTEREAAALIVEEARMILQQDLVEMGVQWNPCALLHSSTCSLTHSESEVKEHTFISQTKSSYKKLTSKNKSNTIFSDSYIKHSPNIVQDLNKSREHTSSFNCNFQNGNQEHQTCSIFRARKRASLDINKEKPGASQNEGKTSDKKVVQTFSQKTKKAPLNFNSEKMSRSFRSWKRRKHLKRSRDSSPLKDSGACRIHLQGQTLSNPSLCEDPFTLDEKKTEFRNSGPFAKNVSLSGKEKDNKTSFPLQIKQNCSWNITLTNDNFVEHIVTGSQSKNVTCQATSVVSEKGRGVAVEAEKINEVLIQNGSKNQNVYMKHHDIHPINQYLRKQSHEQTSTITKQKNIIERQMPCEAVSSYINRDSNVTINCERIKLNTEENKPSHFQALGDDISRTVIPSEVLPSAGAFSKSEGQHENFLNISRLQEKTGTYTTNKTKNNHVSDLGLVLCDFEDSFYLDTQSEKIIQQMATENAKLGAKDTNLAAGIMQKSLVQQNSMNSFQKECHIPFPAEQHPLGATKIDHLDLKTVGTMKQSSDSHGVDILTPESPIFHSPILLEENGLFLKKNEVSVTDSQLNSFLQGYQTQETVKPVILLIPQKRTPTGVEGECLPVPETSLNMSDSLLFDSFSDDYLVKEQLPDMQMKEPLPSEVTSNHFSDSLCLQEDLIKKSNVNENQDTHQQLTCSNDESIIFSEMDSVQMVEALDNVDIFPVQEKNHTVVSPRALELSDPVLDEHHQGDQDGGDQDERAEKSKLTGTRQNHSFIWSGASFDLSPGLQRILDKVSSPLENEKLKSMTINFSSLNRKNTELNEEQEVISNLETKQVQGISFSSNNEVKSKIEMLENNANHDETSSLLPRKESNIVDDNGLIPPTPIPTSASKLTFPGILETPVNPWKTNNVLQPGESYLFGSPSDIKNHDLSPGSRNGFKDNSPISDTSFSLQLSQDGLQLTPASSSSESLSIIDVASDQNLFQTFIKEWRCKKRFSISLACEKIRSLTSSKTATIGSRFKQASSPQEIPIRDDGFPIKGCDDTLVVGLAVCWGGRDAYYFSLQKEQKHSEISASLVPPSLDPSLTLKDRMWYLQSCLRKESDKECSVVIYDFIQSYKILLLSCGISLEQSYEDPKVACWLLDPDSQEPTLHSIVTSFLPHELPLLEGMETSQGIQSLGLNAGSEHSGRYRASVESILIFNSMNQLNSLLQKENLQDVFRKVEMPSQYCLALLELNGIGFSTAECESQKHIMQAKLDAIETQAYQLAGHSFSFTSSDDIAEVLFLELKLPPNREMKNQGSKKTLGSTRRGIDNGRKLRLGRQFSTSKDVLNKLKALHPLPGLILEWRRITNAITKVVFPLQREKCLNPFLGMERIYPVSQSHTATGRITFTEPNIQNVPRDFEIKMPTLVGESPPSQAVGKGLLPMGRGKYKKGFSVNPRCQAQMEERAADRGMPFSISMRHAFVPFPGGSILAADYSQLELRILAHLSHDRRLIQVLNTGADVFRSIAAEWKMIEPESVGDDLRQQAKQICYGIIYGMGAKSLGEQMGIKENDAACYIDSFKSRYTGINQFMTETVKNCKRDGFVQTILGRRRYLPGIKDNNPYRKAHAERQAINTIVQGSAADIVKIATVNIQKQLETFHSTFKSHGHREGMLQSDQTGLSRKRKLQGMFCPIRGGFFILQLHDELLYEVAEEDVVQVAQIVKNEMESAVKLSVKLKVKVKIGASWGELKDFDV

SEQ ID NO: 559 - protein, 2087 aa, Homo sapiens
METESESSTLGDDSVFWLESEVIIQVTDCEEEEREEKFRKMKSSVHSEEDDFVPELHRNVHPRERPDWEETLSAMARGADVPEIPGDLTLKTCGSTASMKVKHVKKLPFTKGHFPKMAECAHFHYENVEFGSIQLSLSEEQNEVMKNGCESKELVYLVQIACQGKSWIVKRSYEDFRVLDKHLHLCIYDRRFSQLSELPRSDTLKDSPESVTQMLMAYLSRLSAIAGNKINCGPALTWMEIDNKGNHLLVHEESSINTPAVGAAHVIKRYTARAPDELTLEVGDIVSVIDMPPKVLSTWWRGKHGFQVGLFPGHCVELINQKVPQSVTNSVPKPVSKKHGKLITFLRTFMKSRPTKQKLKQRGILKERVFGCDLGEHLLNSGFEVPQVLQSCTAFIERYGIVDGIYRLSGVASNIQRLRHEFDSEHVPDLTKEPYVQDIHSVGSLCKLYFRELPNPLLTYQLYEKFSDAVSAATDEERLIKIHDVIQQLPPPHYRTLEFLMRHLSLLADYCSITNMHAKNLAIVWAPNLLRSKQIESACFSGTAAFMEVRIQSVVVEFILNHVDVLFSGRISMAMQEGAASLSRPKSLLVSSPSTKLLTLEEAQARTQAQVNSPIVTENKYIEVGEGPAALQGKFHTIIEFPLERKRPQNKMKKSPVGSWRSFFNLGKSSSVSKRKLQRNESEPSEMKAMALKGGRAEGTLRSAKSEESLTSLHAVDGDSKLFRPRRPRSSSDALSASFNGEMLGNRCNSYDNLPHDNESEEEGGLLHIPALMSPHSAEDVDLSPPDIGVASLDFDPMSFQCSPPKAESECLESGASFLDSPGYSKDKPSANKKDAETGSSQCQTPGSTASSEPVSPLQEKLSPFFTLDLSPTEDKSSKPSSFTEKVVYAFSPKIGRKLSKSPSMSISEPISVTLPPRVSEVIGTVSNTTAQNASSSTWDKCVEERDATNRSPTQIVKMKTNETVAQEAYESEVQPLDQVAAEEVELPGKEDQSVSSSQSKAVASGQTQTGAVTHDPPQDSVPVSSVSLIPPPPPPKNVARMLALALAESAQQASTQSLKRPGTSQAGYTNYGDIAVATTEDNLSSSYSAVALDKAYFQTDRPAEQFHLQNNAPGNCDHPLPETTATGDPTHSNTTESGEQHHQVDLTGNQPHQAYLSGDPEKARITSVPLDSEKSDDHVSFPEDQSGKNSMPTVSFLDQDQSPPRFYSGDQPPSYLGASVDKLHHPLEFADKSPTPPNLPSDKIYPPSGSPEENTSTATMTYMTTTPATAQMSTKEASWDVAEQPTTADFAAATLQRTHRTNRPLPPPPSQRSAEQPPVVGQVQAATNIGLNNSHKVQGVVPVPERPPEPRAMDDPASAFISDSGAAAAQCPMATAVQPGLPEKVRDGARVPLLHLRAESVPAHPCGFPAPLPPTRMMESKMIAAIHSSSADATSSSNYHSFVTASSTSVDDALPLPLPVPQPKHASQKTVYSSFARPDVTTEPFGPDNCLHFNMTPNCQYRPQSVPPHHNKLEQHQVYGARSEPPASMGLRYNTYVAPGRNASGHHSKPCSRVEYVSSLSSSVRNTCYPEDIPPYPTIRRVQSLHAPPSSMIRSVPISRTEVPPDDEPAYCPRPLYQYKPYQSSQARSDYHVTQLQPYFENGRVHYRYSPYSSSSSSYYSPDGALCDVDAYGTVQLRPLHRLPNRDFAFYNPRLQGKSLYSYAGLAPRPRANVTGYFSPNDHNVVSMPPAADVKHTYTSWDLEDMEKYRMQSIRRESRARQKVKGPVMSQYDNMTPAVQDDLGGIYVIHLRSKSDPGKTGLLSVAEGKESRHAAKAISPEGEDRFYRRHPEAEMDRAHHHGGHGSTQPEKPSLPQKQSSLRSRKLPDMGCSLPEHRAHQEASHRQFCESKNGPPYPQGAGQLDYGSKGIPDTSEPVSYHNSGVKYAASGQESLRLNHKEVRLSKEMERPWVRQPSAPEKHSRDCYKEEEHLTQSIVPPPKPERSHSLKLHHTQNVERDPSVLYQYQPHGKRQSSVTVVSQYDNLEDYHSLPQHQRGVFGGGGMGTYVPPGFPHPQSRTYATALGQGAFLPAELSLQHPETQIHAE

SEQ ID NO: 560 - protein, 1901 aa, Homo sapiens
MATFRNNHMKTKASVRKSFSEDVFQSVKSLLQSQKELCSVTAEDCLQQDEHANLTEVTFLGFNEETDAAHIQDLAAVSLELPDILNSLHFCSLNENEIICMKNINKPLDISSDPLNQSHPSGMLCVMRVSPTSPRLRIDFIFSLLSKYATGIRYTLDTFLHQKHQLETTDEDDDDTNQSVSSIEDDFVTAFEHLEEEETSKPYNDGMNITVLRSQCDAASQTVTGHHLETHDLKILISSGQQKSLAKPSTSSVNVLGHKELPSVKTSVTTSISEPWTQRSFYRSSNASDKDSDLQKTFFSSSPAYSSESECSSPSPVIFLDEEGYQKSLKAKLELPKIPVMKDDIEDSDSEVSEFFDSFDQFDELEQTLETCLFNKDPVIGKSSQRKGHKHGKSCMNPQKFKFDRPALPANVRKPTPRKPESPYGNLCDAPDSPRPVKASREDSGLFSPIRSSAFSPLGGCTPAECFCQTDIGGDRIHENHDSVYYTYEDYAKSISCEVLGSVLRTHHTNTLSNINSIKHGENKTVTFKHGNLDQKNKSKNKSLMIKDSIQKFAADLVEKSFGSAFKDLQKGVSSCTNALYHLAIKLTSSVLQMAFDELRRQRAFSLKERAISGLANFLVSEALSNALKDLQYVKKQIFTNTVARFAADLAEELVFEGIMEVCQFSYPQTPASPQCGSFDFEDKVVKLYAKDLSESVIQEAFIELSQVDVTFTTKAAVSVSTDNIKYVSAESVVPSTQAVTFSPSFHNQAIMVTKPVQEYKKEYTVQQALFCTSGIVTSIPVPLAGSALLPYHISSTACQAKAHLSSDDSNSNGDSAQVHIATKNREEKAACLRNICLPSEHNPGNQNDFKPTNDDIEMQSSSKLPNDPAIISNFSAAVVHTIVNETLESMTSLEVTKMVDERTDYLTKSLKEKTPPFSHCDQAVLQCSEASSNKDMFADRLSKSIIKHSIDKSKSVIPNIDKNAVYKESLPVSGEESQLTPEKSPKFPDSQNQLTHCSLSAAKDCVPECKVSMVHGSSLETLPSCPAVTGQKSDLKESAKDQPLKKHNLNSTSLEALSFGQENPFPHSHTFSSTALTCVDGLHVEDKQKVRDRNVIPDTPPSTPLVPSRASSEWDIKKLTKKLKGELAKEFAPATPPSTPHNSSVGSLSENEQNTIEKEEFMLKLMRSLSEEVESSESGELPEVDVKSEHSGKKVQFAEALATHILSLATEMAASHLDNKIIQEPKVKNPCLNVQSQRSVSPTFLNPSDENLKTLCNFAGDLAAEVITEAEKIAKVRNCMLFKQKKNSCYADGDEDYKVEEKLDIEAVVHPREVDPFILSLPPSSCMSGLMYKYPSCESVTDEYAGHLIQILKQEGGNSELIMDQYANRLAYRSVKSGLQEAAKTTKVQCNSRMFPVPSSQVKTNKELLMFSNKEHHQEADKKRQSKRNEGYFCKNQTCERTLDPYRNEVSQLYSFSTSLVHSITKDAKEELTASLVGLPKSLTDSCLFEKSGYEEDNECHVTPELPKSLQPSSQNHRFYHSTGSLNGYGCGDNVVQAVEQYAKKVVDDTLELTLGSTVFRVSETTKSADRVTYAEKLSPLTGQACRYCDLKELHNCTGNSSQHFFRQGSLASSKPASNPKFSSRYQKSRIFHLSVPQIHVNLDKKAVLAEKIVAEAIEKAERELSSTSLAADSGIGQEGASFAESLATETMTAAVTNVGHAVSSSKEIEDFQSTESVSSQQMNLSIGDDSTGSWSNLSFEDEHQDESSSFHHLSESNGNSSSWSSLGLEGDLYEDNLSFPTSDSDGPDDKDEEHEDEVEGLGQDGKTLLITNIDMEPCTVDPQLRIILQWLIASEAEVAELYFHDSANKEFMLLSKQLQEKGWKVGDLLQAVLQYYEVMEKASSEERCKSLFDWLLENA

SEQ ID NO: 561 - protein, 1066 aa, Homo sapiens
MTSYRERSADLARFYTVTEPQRHPRGYTVYKVTARVVSRRNPEDVQEIIVWKRYSDFKKLHKELWQIHKNLFRHSELFPPFAKGIVFGRFDETVIEERRQCAEDLLQFSANIPALYNSKQLEDFFKGGIINDSSELIGPAEAHSDSLIDTFPECSTEGFSSDSDLVSLTVDVDSLAELDDGMASNQNSPIRTFGLNLSSDSSALGAVASDSEQSKTEEERESRSLFPGSLKPKLGKRDYLEKAGELIKLALKKEEEDDYEAASDFYRKGVDLLLEGVQGESSPTRREAVKRRTAEYLMRAESISSLYGKPQLDDVSQPPGSLSSRPLWNLRSPAEELKAFRVLGVIDKVLLVMDTRTEQTFILKGLRKSSEYSRNRKTIIPRCVPNMVCLHKYIISEESVFLVLQHAEGGKLWSYISKFLNRSPEESFDIKEVKKPTLAKVHLQQPTSSPQDSSSFESRGSDGGSMLKALPLKSSLTPSSQDDSNQEDDGQDSSPKWPDSGSSSEEECTTSYLTLCNEYGQEKIEPGSLNEEPFMKTEGNGVDTKAIKSFPAHLAADSDSPSTQLRAHELKFFPNDDPEAVSSPRTSDSLSRSKNSPMEFFRIDSKDSASELLGLDFGEKLYSLKSEPLKPFFTLPDGDSASRSFNTSESKVEFKAQDTISRGSDDSVPVISFKDAAFDDVSGTDEGRPDLLVNLPGELESTREAAAMGPTKFTQTNIGIIENKLLEAPDVLCLRLSTEQCQAHEEKGIEELSDPSGPKSYSITEKHYAQEDPRMLFVAAVDHSSSGDMSLLPSSDPKFQGLGVVESAVTANNTEESLFRICSPLSGANEYIASTDTLKTEEVLLFTDQTDDLAKEEPTSLFQRDSETKGESGLVLEGDKEIHQIFEDLDKKLALASRFYIPEGCIQRWAAEMVVALDALHREGIVCRDLNPNNILLNDRGHIQLTYFSRWSEVEDSCDSDAIERMYCAPEVGAITEETEACDWWSLGAVLFELLTGKTLVECHPAGINTHTTLNMPECVSEEARSLIQQLLQFNPLERLGAGVAGVEDIKSHPFFTPVDWAELMR

SEQ ID NO: 562 - protein, 2339 aa, Homo sapiens [sequence omitted]

SEQ ID NO: 563 - protein, 1498 aa, Homo sapiens
MDGASAEQDGLQEDRSHSGPSSLPEAPLKPPGPLVPPDQQDKVQCAEVNRASTEGESPDGPGQGGLCQNGPTPPFPDPPSSLDPTTSPVGPDASPGVAGFHDNLRKSQGTSAEGSVRKEALQSLRLSLPMQETQLCSTDSPLPLEKEEQVRLQARKWLEEQLKQYRVKRQQERSSQPATKTRLFSTLDPELMLNPENLPRASTLAMTKEYSFLRTSVPRGPKVGSLGLPAHPREKKTSKSSKIRSLADYRTEDSNAGNSGGNVPAPDSTKGSLKQNRSSAASVVSEISLSPDTDDRLENTSLAGDSVSEVDGNDSDSSSYSSASTRGTYGILSKTVGTQDTPYMVNGQEIPADTLGQFPSIKDVLQAAAAEHQDQGQEVNGEVRSRRDSICSSVSLESSAAETQEEMLQVLKEKMRLEGQLEALSLEASQALKEKAELQAQLAALSTKLQAQVECSHSSQQRQDSLSSEVDTLKQSCWDLERAMTDLQNMLEAKNASLASSNNDLQVAEEQYQRLMAKVEDMQRSMLSKDNTVHDLRQQMTALQSQLQQVQLERTTLTSKLKASQAEISSLQSVRQWYQQQLALAQEARVRLQGEMAHIQVGQMTQAGLLEHLKLENVSLSQQLTETQHRSMKEKGRIAAQLQGIEADMLDQEAAFMQIQEAKTMVEEDLQRRLEEFEGERERLQRMADSAASLEQQLEQVKLTLLQRDQQLEALQQEHLDLMKQLTLTQEALQSREQSLDALQTHYDELQARLGELQGEAASREDTICLLQNEKIILEAALQAAKSGKEELDRGARRLEEGTEETSETLEKLREELAIKSGQVEHLQQETAALKKQMQKIKEQFLQQKVMVEAYRRDATSKDQLISELKATRKRLDSELKELRQELMQVHGEKRTAEAELSRLHREVAQVRQHMADLEGHLQSAQKERDEMETHLQSLQFDKEQMVAVTEANEALKKQIEELQQEARKAITEQKQKMRRLGSDLTSAQKEMKTKHKAYENAVGILSRRLQEALAAKEAADAELGQLRAQGGSSDSSLALHERIQALEAELQAVSHSKTLLEKELQEVIALTSQELEESREKVLELEDELQESRGFRKKIKRLEESNKKLALELEHEKGKLTGLGQSNAALREHNSILETALAKREADLVQLNLQVQAVLQRKEEEDRQMKHLVQALQASLEKEKEKVNSLKEQVAAAKVEAGHNRRHFKAASLELSEVKKELQAKEHLVQKLQAEADDLQIREGKHSQEIAQFQAELAEARAQLQLLQKQLDEQLSKQPVGNQEMENLKWEVDQKEREIQSLKQQLDLTEQQGRKELEGLQQLLQNVKSELEMAQEDLSMTQKDKFMLQAKVSELKNNMKTLLQQNQQLKLDLRRGAAKTRKEPKGEASSSNPATPIKIPDCPVPASLLEELLRPPPAVSKEPLKNLNSCLQQLKQEMDSLQRQMEEHALTVHESLSSWTPLEPATASPVPPGGHAGPRGDPQRHSQSRASKEGPGE

SEQ ID NO: 564 - protein, 1848 aa, Homo sapiens
MSVGELYSQCTRVWIPDPDEVWRSAELTKDYKEGDKSLQLRLEDETILEYPIDVQRNQLPFLRNPDILVGENDLTALSYLHEPAVLHNLKVRFLESNHIYTYCGIVLVAINPYEQLPIYGQDVIYTYSGQNMGDMDPHIFAVAEEAYKQMARDEKNQSIIVSGESGAGKTVSAKYAMRYFATVGGSASETNIEEKVLASSPIMEAIGNAKTTRNDNSSRFGKYIQIGFDKRYHIIGANMRTYLLEKSRVVFQADDERNYHIFYQLCAAAGLPEFKELALTSAEDFFYTSQGGDTSIEGVDDAEDFEKTRQAFTLLGVKESHQMSIFKIIASILHLGSVAIQAERDGDSCSISPQDVYLSNFCRLLGVEHSQMEHWLCHRKLVTTSETYVKTMSLQQVINARNALAKHIYAQLFGWIVEHINKALHTSLKQHSFIGVLDIYGFETFEVNSFEQFCINYANEKLQQQFNSHVFKLEQEEYMKEQIPWTLIDFYDNQPCIDLIEAKLGILDLLDEECKVPKGTDQNWAQKLYDRHSSSQHFQKPRMSNTAFIIVHFADKVEYLSDGFLEKNRDTVYEEQINILKASKFPLVADLFHDDKDPVPATTPGKGSSSKISVRSARPPMKVSNKEHKKTVGHQFRTSLHLLMETLNATTPHYVRCIKPNDEKLPFHFDPKRAVQQLRACGVLETIRISAAGYPSRWAYHDFFNRYRVLVKKRELANTDKKAICRSVLENLIKDPDKFQFGRTKIFFRAGQVAYLEKLRADKFRTATIMIQKTVRGWLQKVKYHRLKGATLTLQRYCRGHLARRLAEHLRRIRAAVVLQKHYRMQRARQAYQRVRRAAVVIQAFTRAMFVRRTYRQVLMEHKATTIQKHVRGWMARRHFQRLRDAAIVIQCAFRMLKARRELKALRIEARSAEHLKRLNVGMENKVVQLQRKIDEQNKEFKTLSEQLSVTTSTYTMEVERLKKELVHYQQSPGEDTSLRLQEEVESLRTELQRAHSERKILEDAHSREKDELRKRVADLEQENALLKDEKEQLNNQILCQSKDEFAQNSVKENLMKKELEEERSRYQNLVKEYSQLEQRYDNLRDEMTIIKQTPGHRRNPSNQSSLESDSNYPSISTSEIGDTEDALQQVEEIGLEKAAMDMTVFLKLQKRVRELEQERKKLQVQLEKREQQDSKKVQAEPPQTDIDLDPNADLAYNSLKRQELESENKKLKNDLNELRKAVADQATQNNSSHGSPDSYSLLLNQLKLAHEELEVRKEEVLILRTQIVSADQRRLAGRNAEPNINARSSWPNSEKHVDQEDAIEAYHGVCQTNSKTEDWGYLNEDGELGLAYQGLKQVARLLEAQLQAQSLEHEEEVEHLKAQLEALKEEMDKQQQTFCQTLLLSPEAQVEFGVQQEISRLTNENLDLKELVEKLEKNERKLKKQLKIYMKKAQDLEAAQALAQSERKRHELNRQVTVQRKEKDFQGMLEYHKEDEALLIRNLVTDLKPQMLSGTVPCLPAYILYMCIRHADYTNDDLKVHSLLTSTINGIKKVLKKHNDDFEMTSFWLSNTCRLLHCLKQYSGDEGFMTQNTAKQNEHCLKNFDLTEYRQVLSDLSIQIYQQLIKIAEGVLQPMIVSAMLENESIQGLSGVKPTGYRKRSSSMADGDNSYCLEAIIRQMNAFHTVMCDQGLDPEIILQVFKQLFYMINAVTLNNLLLRKDVCSWSTGMQLRYNISQLEEWLRGRNLHQSGAVQTMEPLIQAAQLLQLKKKTQEDAEAICSLCTSLSTQQIVKILNLYTPLNEFEERVTVAFIRTIQAQLQERNDPQQLLLDAKHMFPVLFPFNPSSLTMDSIHIPACLNLEFLNEV

SEQ ID NO: 565 - protein, 1209 aa, Homo sapiens
MFLMNASPVVALQSKWEAFGPPGSCRFPRCFSEADEGVESASVSARVQMLISTLQRDGAARGTSDERAAQRGHRAEGCHDARPAAKPTVHKEPPALAVCGLVADFDPMGEEETTDFGPLVLDSDSDDSVDRDIEEAIQEYLKAKSGAAQPGAGGAQPGAAQPSRAAGGGSRCKPEPAHGSAPTALCPPKLVPGSGGGPGSQVGSSKDQGSASPVSVSSDDSFEQSIRAEIEQFLNEKRQHETQKCDGSVEKKPDTNENSAKSLLKSHQEPPTKVVHRQGLLGVQKEFAFRKPPRLAKMNVQPRSLRSKVTTTQENEGSTKPATPCRPSEAAQNKGGIKRSASAARRGKRVMSAAQASEASDSSSDDGIEEAIQLYQLQKTRKEADGDLPQRVQLREERAPDPPAHSTSSATKSALPETHRKTPSKKKLVATKTMDPGPGGLDTDHAPKLLKETKAPPPASPASRSEFVERSSCRADTSAELMCAEAILDISKTILPAPVEGSDGSLSASPLFYSPNVPSRSDGDSSSVDSDDSIEQEIRTFLALKAQSGSLLARGESCPQAAQGPLLPPGLNSQTGGHKTPLSKTPDPLLGCKRKRRGGGHVRPSTPKKMQEVVKDGSQDADHSQGRAEPGHERRDLPIQGKASEALGGEGTARGPGDTRMSQGQGKTDEARRLDEKESSEDKSSSLDSDEDLDTAIKDLLRSKRKLKKRCREPRAACRKKVRFSTAQTHFLEQLGGLRRDWKDRGPPVLKSCLSKSKRDSGEGPGKKPPSVFGSTAERMRQEGAASQDAALAFRVRRPASASASEGNPFPRESQGPAPSPGSLSDDSSSVDSNDSIELEIRKFLAEKAKESVSSSEVQAEGPTALGTGGPARPEVLCRKEPAPPPGVCTRSQRARGVPHLAEGLRGTESAGAQGTAGLFSQGGKGLPAAPARGDPVPPRSTSGGVSAKGLSVSRRNVYVHKDQSPRGAEPAAKSAFGQLPSCATAGTEAGGARGTFHMGCGSPSFLTPSPGAERDAGAQADRTPPWSDFAHQSRLPSPWVLRSEGRDAVWRGGVGSERDKGSEGPARGLPSLPLAGFSPLLSTQLFHFGKGVSWGGRQAGLFSPHLGLPLQGPSFSAFREAQAGPSPVFGSPHLLAKKDGGPWPTRKAQAGLSLHDRRSSGSEESILDLRYRRRVNRDDQEQDALGSDASDFSDTSTEDSGGSSVVKV

SEQ ID NO: 566 - protein, 1659 aa, Homo sapiens
MSSRRKRAPPVRVDEEKRQQLHWNMHEDRRNEPIIISDDDEQPCPGSDTSSAHYIILSDSLKEEVAHRDKKRCSKVVSFSKPIEKEETVGIFSPLSVKLNIVISPYHFDNSWKAFLGELTLQLLPAQSLIENFSERSITLMSSESSNQFLIYVHSKGEDVEKQKKEPMSICDKGILVESSFSGEMLEDLGWLQKKRRIKLYQKPEGNHIIKVGIYLLEAGLAKLDFLSDANSRMKKFNQLMKKVMEKLHNSIIPDVLEEDEDDPESEPEGQDIDELYHFVKQTHQQETQSIQVDVQHPALIPVLRPYQREAVNWMLQQECFRSSPATESALHFLWREIVTSEGLKLYYNPYTGCIIREYPNSGPQLLGGILADEMGLGKTVEVLALILTHTRQDVKQDALTLPEGKVVNYFIPSHYFGGKLKKTEIQNIEFEPKEKVQCPPTRVMILTAVKEMNGKKGVSILSIYKYVSSIYRYDVQRNRSLLKRMLKCLIFEGLVKQIKGHGFSGTFTLGKNYKEEDICDKTKKQAVGSPRKIQKETRKSGNKDTDSEYLPSDTSDDDDDPYYYYYKSRRNRSKLRKKLVPSTKKGKSQPFINPDSQGHCPATSDSGITDVAMSKSTCISEFNQEHETEDCAESLNHADSDVPPSNTMSPFNTSDYRFECICGELDQIDRKPRVQCLKCHLWQHAKCVNYDEKNLKIKPFYCPHCLVAMEPVSTRATLIISPSSICHQWVDEINRHVRSSSLRVLVYQGVKKDGFLQPHFLAEQDIVIITYDVLRSELNYVDIPHSNSEDGRRLRNQKRYMAIPSPLVAVEWWRICLDEAQMVECPTVKAAEMAQRLSGINRWCISGTPVQRGLEDLFGLVVFLGIEPYCVKHWWVRLLYRPYCKKNPQHLYSFIAKILWRSAKKDVIDQIQIPPQTEEIHWLHFSPVERHFYHRQHEVCCQDVVVKLRKISDWALKLSSLDRRTVTSILYPLLRLRQACCHPQAVRGEFLPLQKSFEQSTFSFSTMTMEELLTSLQKKCGTECEEAHRQLVCALNGLAGIHIIKGEYALAAELYREVLRSSEEHKGKLKTDSLQRLHATHNLMELLIARHPGIPPTLRDGRLEEEAKQLREHYMSKCNTEVAEAQQALYPVQQTIHELQRKIHSNSPWWLNVIHRAIEFTIDEELVQRVRNEITSNYKQQTGKLSMSEKGLQFLLTTQMEELNKCQKLVREAVKNLEGPPSRNVIESATVCHLRPARLPLNCCVFCKADELFTEYESKLFSNTVKGQTAIFEEMIEDEEGLVDDRAPTTTRGLWAISETERSMKAILSFAKSHRFDVEFVDEGSTSMDLFEAWKKEYKLLHEYWMALRNRVSAVDELAMATERLRVRDPREPKPNPPVLHIIEPHEVEQNRIKLLNDKAVATSQLQKKLGQLLYLTNLEKSQDKTSGGVNPEPCPICARQLGKQWAVLTCGHCFCNECISIIIEQYSVGSHRSSIKCAICRQTTSHKEISYVFTSEKANQEEDIPVKGSHSTKVEAVVRTLMKIQLRDPGAKALVFSTWQDVLDIISKALTDNNMEFAQISRVKTFQENLSAFKRDPQINILLLPLHTGSNGLTIIEATHVLLVEPILNPAHELQAIGRVHRIGQTKPTIVHRFLIKATIEERMQAMLKTAERSIYI

SEQ ID NO: 567 - protein, 1674 aa, Homo sapiens
MQEESANDMECEQLPAEILRQVTVHRDPIYGFGFVAGSERPVVVRSVRPVSEKLFSKKIFAKHQKQHSLVVSLYPHPLPQPRRQQQRQQQQQRARIAPSTPPQLSLHHLQASAPASAPTGGPSENKLLAGDQIVAINEEDVSEAPRERLIELIRSAKEFIVLTVLHTHQSPKSAFISAAKKAKLRSNPVKVRFSEQVAVGETDAKMMKKEALLLIPNVLKVFLENGQIKSFTFDGRTTVKDVMLTLQDRLSLRFIEHFALVLEYAGPEQNHKFLLLQDKQPLAYVVQRTHYHGMKCLFRISFFPKDPVELLRRDPAAFEYLYIQGSAIQAKLQYLRILNELPTFTGVLFNTVGLDEKQSATTLLVGPRHGISHVIDLKTNLTTVLSEFSKISKIQLFRENQGVARVETSIMDAKPLVLLMEWPEATNFACLIAGYCRLLLDSRKMVFSRPASQPLPPPMIKADYMHSAHRPVTGGHLGKKESSYVGSVGTSPRKSSRCTPPPADSELVSFCYLHMREQRKEQESRTDVNENLIFFEETRPRTKSDPTSKSSGQGYEVVPDDFDAASLDHEPCASRARSYTLDNSLGAEALNFYCDSCKAKLQSSWALANVQTRTVRDHAQELDDALVSTLQALEALAASEDGPHPPPPQTAGLIVLATITPESSLDSGHETNSSELTDMSEMMSAMKQHQNTTYFLAQHLNKDSLLARKDLPFRIQSCAAQAVLTAPYSLGRPDPNPSLQPIATGQSPGPPGARRKLPQSEGQVQGERTYSLAVHPALSPQLSEQKNLSLLSPVPEDKGPGHTRAGLEMSLRAATSSLSEEQVSELRDNLPKEVRLSPKLILDPKSSVTPAIISAALQQVVHNKSLVTAGGALGNPPSRGERRLEASMGRPEVSMMSSSASKNLKFKISPSAPETSWNSQHQLGAEVSSSPRAPTGSRADSLHLSQQEDSLPVQNFPPKSYLLRTSRESVGKQATGEVAGKGGPVGGKPTLQKQGTISSQGEKAQLESTPKRSKLEETSLVPRATYPMALQSPSCQSRSHSPSCQPHGHSPSSQSRGQSPSCQPRGQSPLRSQAASRQVSTMPSRKLETTLNGAHSTSEGPAKPKSSRGPFRLRNLFSATFPTRQKKETDERQAQLQKVKQYELEFLEELLKPPSQGELPGTEYLQPPAPGRCSCQLRSSPVQQGPGMSREQRRSCDCKRICRGGRPQATQTPVPSLRGRERDRVLPSQRQPEAGPGVSLSSPINVQRIRSTSLESRECRSDPESGVSCLTTCASGGECLGAPNYRKLMRRYSISELDQGDRASLTSDVYPHPPLGMLPREAKEVEASLPIALGPKSRSLESPTLGDPSYVQVAPETKGPRQMAVFSLPEEVYRKPAELDEDSESSKCCSIRYCFYYRKCDMADDASDGKDELSYSIPMKILPGMKLDEQVVPVVSRTLQVLDAATCSSSSPEASRTQEIDLRVSTFEGSLAKINALRAHAYGLPDGFLAARLDTNELLTVLRQCVASPEARAPKPYVSQISEYKLELALKFKELRASCRRVANVDKSPTHMLAAITGSFQVLSSLIETFVRLVFIVRSEAQRQELLAKVEEVVRNYTFLLRAAEESTARNLNQQQQQQQQQQQQQQQQQQQQQQQQQQQVAAAAGAATEHPPGSPTSATVMSTFTHSLKTLIK

SEQ ID NO: 568 - protein, 1530 aa, Homo sapiens
MSSQGSPSVALSTTTVSSVAVQAGDSKIVIAVIKCGKWVQLQLAESQPNLLEIGSSQDETKKLLHDHELLLAKLKALEDRVWELLQEADKTAEENKDQSQVYDAMAETLGEAWAALVSMLERRTELLRLTSEFFENALEFAIKIDQAEDFLQNTHEFESAESLKSLLQLHEHHTKELLERSLALLNKSQQLTDFIEKFKCEGPNVNPELTQGAHSSCLKVDRLLELLQDRRRQLDKYLKQQWQELSQVLQICQWDQQENQVTCWFQKTIRNLQEQSLGSSLSDNEDRIHKQEELIIKAKEWNSAVEKLKSEALRILLSKDYVEKEHLQLSHQKLSQLQEEFGQLMVERNTWLKKANEFFNSANKAFDVLGRVEAYLKLLKSEGLSLAVLAVRHEELHRKIKDCTTDALQKGQTLISQVDSCSSQVSGIHEMMGCIKRRVDHLTEQCSAHKEYALKKQQLTASVEGYLRKVEMSIQKISPVLSNAMDVGSTRSESEKILNKYLELDIQAKETSHELEAAAKTMMEKNEFVSDEMVSLSSKARWLAEELNLFGQSIDYRSQVLQTYVAFLKSSEEVEMQFQSLKEFYETEIPQKEQDDAKAKHCSDSAEKQWQLFLKKSFITQDLGLEFLNLINMAKENEILDVKNEVYLMKNTMENQKAEREELSLLRLAWQLKATESKPGKQQWAAFKEQLKKTSHNLKLLQEALMPVSALDLGGSLQFILDLRQKWNDMKPQFQQLNDEVQYIMKESEELTGRGAPVKEKSQQLKDLIHFHQKQKERIQDYEDILYKVVQFHQVKEELGRLIKSRELEFVEQPKELGDAHDVQIHLRCSQEKQARVDHLHRLALSLGVDIISSVQRPHCSNVSAKNLQQQLELLEEDSMKWRAKAEEYGRTLSRSVEYCAMRDEINELKDSFKDIKKKFNNLKFNYTKKNEKSRNLKALKYQIQQVDMYAEKMQALKRKMEKVSNKTSDSFLNYPSDKVNVLLEVMKDLQKHVDDFDKVVTDYKKNLDLTEHFQEVIEECHFWYEDASATVVRVGKYSTECKTKEAVKILHQQFNKFIAPSVPQQEERIQEATDLAQHLYGLEEGQKYIEKIVTKHKEVLESVTELCESLTELEEKLKQGDVLKMNPNLEDFHYDYIDLLKEPAKNKQTIFNEERNKGQVQVADLLGINGTGEERLPQDLKVSTDKEGGVQDLLLPEDMLSGEEYECVSPDDISLPPLPGSPESPLAPSDMEVEEPVSSSLSLHISSYGVQAGTSSPGDAQESVLPPPVAFADACNDKRETFSSHFERPYLQFKAEPPLTSRGFVEKSTALHRISAEHPESMMSEVHERALQQHPQAQGGLLETREKMHADNNFTKTQDRLHASSDAFSGLRFQSGTSRGYQRQMVPREEIKSTSAKSSVVSLADQAPNFSRLLSNVTVMEGSPVTLEVEVTGFPEPTLTWYKKGQKLSADGHLQVLHKETRHSVFIPKVCKADAGLYVARAQNSSGALSSNVILHVTGNCRLPITRVNWITLCVVYVSVSLMYWLLTQ

SEQ ID NO: 569 - protein, 1804 aa, Homo sapiens
MTSLKRSQTERPLATDRASVVGTDGTPKVHTDDFYMRRFRSQNGSLGSSVMAPVGPPRSEGSHHITSTPGVPKMGVRARIADWPPRKENIKESSRSSQEIETSSCLDSLSSKSSPVSQGSSVSLNSNDSAMLKSIQNTLKNKTRPSENMDSRFLMPEAYPSSPRKALRRIRQRSNSDITISELDVDSFDECISPTYKTGPSLHREYGSTSSIDKQGTSGESFFDLLKGYKDDKSDRGPTPTKLSDFLITGGGKGSGFSLDVIDGPISQRENLRLFKEREKPLKRRSKSETGDSSIFRKLRNAKGEELGKSSDLEDNRSEDSVRPWTCPKCFAHYDVQSILFDLNEAIMNRHNVIKRRNTTTGASAAAVASLVSGPLSHSASFSSPMGSTEDLNSKGSLSMDQGDDKSNELVMSCPYFRNEIGGEGERKISLSKSNSGSFSGCESASFESTLSSHCTNAGVAVLEVPKENLVLHLDRVKRYIVEHVDLGAYYYRKFFYQKEHWNYFGADENLGPVAVSIRREKPDEMKENGSPYNYRIIFRTSELMTLRGSVLEDAIPSTAKHSTARGLPLKEVLEHVVPELNVQCLRLAFNTPKVTEQLMKLDEQGLNYQQKVGIMYCKAGQSTEEEMYNNESAGPAFEEFLQLLGERVRLKGFEKYRAQLDTKTDSTGTHSLYTTYKDYEIMFHVSTMLPYTPNNKQQLLRKRHIGNDIVTIVFQEPGAQPFSPKNIRSHFQHVFVIVRVHNPCSDSVCYSVAVTRSRDVPSFGPPIPKGVTFPKSNVFRDFLLAKVINAENAAHKSEKFRAMATRTRQEYLKDLAEKNVTNTPIDPSGKFPFISLASKKKEKSKPYPGAELSSMGAIVWAVRAEDYNKAMELDCLLGISNEFIVLIEQETKSVVFNCSCRDVIGWTSTDTSLKIFYERGECVSVGSFINIEEIKEIVKRLQFVSKGCESVEMTLRRNGLGQLGFHVNYEGIVADVEPYGYAWQAGLRQGSRLVEICKVAVATLSHEQMIDLLRTSVTVKVVIIPPHDDCTPRRSCSETYRMPVMEYKMNEGVSYEFKFPFRNNNKWQRNASKGPHSPQVPSQVQSPMTSRLNAGKGDGKMPPPERAANIPRSISSDGRPLERRLSPGSDIYVTVSSMALARSQCRNSPSNLSSSSDTGSVGGTYRQKSMPEGFGVSRRSPASIDRQNTQSDIGGSGKSTPSWQRSEDSIADQMAYSYRGPQDFNSFVLEQHEYTEPTCHLPAVSKVLPAFRESPSGRLMRQDPVVHLSPNKQGHSDSHYSSHSSSNTLSSNASSAHSDEKWYDGDRTESELNSYNYLQGTSADSGIDTTSYGPSHGSTASLGAATSSPRSGPGKEKVAPLWHSSSEVISMADRTLETESHGLDRKTESSLSLDIHSKSQAGSTPLTRENSTFSINDAASHTSTMSSRHSASPVVFTSARSSPKEELHPAAPSQLAPSFSSSSSSSSGPRSFYPRQGATSKYLIGWKKPEGTINSVGFMDTRKRHQSDGNEIAHTRLRASTRDLRASPKPTSKSTIEEDLKKLIDLESPTPESQKSFKFHALSSPQSPFPSTPTSRRALHRTLSDESIYNSQREHFFTSRASLLDQALPNDVLFSSTYPSLPKSLPLRRPSYTLGMKSLHGEFSASDSSLTDIQETRRQPMPDPGLMPLPDTAADLDWSNLVDAAKAYEVQRASFFAASDENHRPLSAASNSDQLEDQALAQMKPYSSSKDSSPTLASKVDQLEGMLKMLREDLKKEKEDKAHLQAEVQHLREDNLRLQEESQNASDKLKKFTEWVFNTIDMS

SEQ ID NO: 570 - protein, 1523 aa, Homo sapiens
MTSVWKRLQRVGKRAAKFQFVACYHELVLECTKKWQPDKLVVVWTRRNRRICSKAHSWQPGIQNPYRGTVVWMVPENVDISVTLYRDPHVDQYEAKEWTFIIENESKGQRKVLATAEVDLARHAGPVPVQVPVRLRLKPKSVKVVQAELSLTLSGVLLREGRATDDDMQSLASLMSVKPSDVGNLDDFAESDEDEAHGPGAPEARARVPQPDPSRELKTLCEEEEEGQGRPQQAVASPSNAEDTSPAPVSAPAPPARTSRGQGSERANEAGGQVGPEAPRPPETSPEMRSSRQPAQDTAPTPAPRLRKGSDALRPPVPQGEDEVPKASGAPPAGLGSARETQAQACPQEGTEAHGARLGPSIEDKGSGDPFGRQRLKAEEMDTEDRPEASGVDTEPRSGGREANTKRSGVRAGEAEESSAVCQVDAEQRSKVRHVDTKGPEATGVMPEARCRGTPEAPPRGSQGRLGVRTRDEAPSGLSLPPAEPAGHSGQLGDLEGARAAAGQEREGAEVRGGAPGIEGTGLEQGPSVGAISTRPQVSSWQGALLSTAQGAISRGLGGWEAEAGGSGDLETETEVVGLEVLGTQEKEVEGSGFPETRTLEIEILGALEKEAARSRVLESEVAGTAQCEGLETQETEVGVIETPGTETEVLGTQKTEAGGSGVLQTRTTIAETEVLVTQEISGDLGPLKIEDTIQSEMLGTQETEVEASRVPESEAEGTEAKILGTQEITARDSGVREIEAEIAESDILVAQEIEVGLLGVLGIETGAAEGAILGTQEIASRDSGVPGLEADTTGIQVKEVGGSEVPEIATGTAETEILGTQEIASRSSGVPGLESEVAGAQETEVGGSGISGPEAGMAEARVLMTRKTEIIVPEAEKEEAQTSGVQEAETRVGSALKYEALRAPVTQPRVLGSQEAKAEISGVQGSETQVLRVQEAEAGVWGMSEGKSGAWGAQEAEMKVLESPENKSGTFKAQEAEAGVLGNEKGKEAEGSLTEASLPEAQVASGAGAGAPRASSPEKAEEDRRLPGSQAPPALVSSSQSLLEWCQEVTTGYRGVRITNFTTSWRNGLAFCAILHRFYPDKIDYASLDPLNIKQNNKQAFDGFAALGVSRLLEPADMVLLSVPDKLIVMTYLCQIRAFCTGQELQLVQLEGGGGAGTYRVGSAQPSPPDDLDAGGLAQRLRGHGAEGPQEPKEAADRADGAAPGVASRNAVAGRASKDGGAEAPRESRPAEVPAEGLVNGAGAPGGGGVRLRRPSVNGEPGSVPPPRAHGSFSHVRDADLLKKRRSRLRNSSSFSMDDPDAGAMGAAAAEGQAPDPSPAPGPPTAADSQQPPGGSSPSEEPPPSPGEEAGLQRFQDTSQYVCAELQALEQEQRQIDGRAAEVEMQLRSLMESGANKLQEEVLIQEWFTLVNKKNALIRRQDQLQLLMEEQDLERRFELLSRELRAMLAIEDWQKTSAQQHREQLLLEELVSLVNQRDELVRDLDHKERIALEEDERLERGLEQRRRKLSRQLSRRERCVLS

SEQ ID NO: 571 - protein, 1667 aa, Homo sapiens
MASKQTKKKEVHRINSAHGSDKSKDFYPFGSNVQSGSTEQKKGKFPLWPEWSEADINSEKWDAGKGAKEKDKTGKSPVFHFFEDPEGKIELPPSLKIYSWKRPQDILFSQTPVVVKNEITFDLFSANEHLLCSELMRWIISEIYAVWKIFNGGILSNYFKGTSGEPPLLPWKPWEHIYSLCKAVKGHMPLFNSYGKYVVKLYWMGCWRKITIDDFLPFDEDNNLLLPATTYEFELWPMLLSKAIIKLANIDIHVADRRELGEFTVIHALTGWLPEVISLHPGYMDKVWELLKEILPEFKLSDEASSESKIAVLDSKLKEPGKEGKEGKEIKDGKEVKDVKEFKPESSLTTLKAPEKSDKVPKEKADARDIGKKRSKDGEKEKFKFSLHGSRPSSEVQYSVQSLSDCSSAIQTSHMVVYATFTPLYLFENKIFSLEKMADSAEKLREYGLSHICSHPVLVTRSRSCPLVAPPKPPPLPPWKLIRQKKETVITDEAQELIVKKPERFLEISSPFLNYRMTPFTIPTEMHFVRSLIKKGIPPGSDLPSVSETDETATHSQTDLSQITKATSQGNTASQVILGKGTDEQTDFGLGDAHQSDGLNLEREIVSQTTATQEKSQEELPTTNNSVSKEIWLDFEDFCVCFQNIYIFHKPSSYCLNFQKSEFKFSEERVSYYLFVDSLKPIELLVCFSALVRWGEYGALTKDSPPIEPGLLTAETFSWKSLKPGSLVLKIHTYATKATVVRLPVGRHMLLFNAYSPVGHSIHICSMVSFVIGDEHVVLPNFEPESCRFTEQSLLIMKAIGNVIANFKDKGKLSAALKDLQTAHYPVPFHDKELTAQHFRVFHLSLWRLMKKVQITKPPPNFKFAFRAMVLDLELLNSSLEEVSLVEWLDVKYCMPTSDKEYSAEEVAAAIKIQAMWRGTYVRLLMKARIPDTKENISVADTLQKVWAVLEMNLEQYAVSLLRLMFKSKCKSLESYPCYQDEETKIAFADYTVTYQEQPPNSWFIVFRETFLVHQDMILVPKVYTTLPICILHIVNNDTMEQVPKVFQKVVPYLYTKNKKGYTFVAEAFTGDTYVAASRWKLRLIGSSAPLPCLSRDSPCNSFAIKEIRDYYIPNDKKILFRYSVKVLTPQPATIQVRTSKPDAFIKLQVLENEETMVSSTGKGQAIIPAFHFLKSEKGLSSQSSKHILSFHSASKKEQEVYVKKKAAQGIQKSPKGRAVSAIQDIGLPLVEEETTSTPTREDSSSTPLQNYKYIIQCSVLYNSWPLTESQLTFVQALKDLKKSNTKAYGERHEELINLGSPDSHTISEGQKSSVTSKTTRKGKEKSSEKEKTAKEKQAPRFEPQISTVHPQQEDPNKPYWILRLVTEHNESELFEVKKDTERADEIRAMKQAWETTEPGRAIKASQARLHYLSGFIKKTSDAESPPISESQTKPKEEVETAARGVKEPNSKNSAGSESKEMTQTGSGSAVWKKWQLTKGLRDVAKSTSSESGGVSSPGKEEREQSTRKENIQTGPRTRSPTILETSPRLIRKALEFMDLSQYVRKTDTDPLLQTDELNQQQAMQKAEEIHQFRQHRTRVLSIRNIDQEERLKLKDEVLDMYKEMQDSLDEARQKIFDIREEYRNKLLEAEHLKLETLAAQEAAMKLETEKMTPAPDTQKKKKGKKK

SEQ ID NO: 572 - protein, 2217 aa, Homo sapiens
MDGDGGRRDVPGTLMEPGRGAGPAGMAEPRAKAARPGPQRFLRRSVVESDQEEPPGLEAAEAPGPQPPQPLQRRVLLLCKTRRLIAERARGRPAAPAPAALVAQPGAPGAPADAGPEPVGTQEPGPDPIAAAVETAPAPDGGPREEAAATVRKEDEGAAEAKPEPGRTRRDEPEEEEDDEDDLKAVATSLDGRFLKFDIELGRGSFKTVYKGLDTETWVEVAWCELQDRKLTKLERQRFKEEAEMLKGLQHPNIVRFYDFWESSAKGKRCIVLVTELMTSGTLKTYLKRFKVMKPKVLRSWCRQILKGLLFLHTRTPPIIHRDLKCDNIFITGPTGSVKIGDLGLATLKRASFAKSVIGTPEFMAPEMYEEHYDESVDVYAFGMCMLEMATSEYPYSECQNAAQIYRKVTCGIKPASFEKVHDPEIKEIIGECICKNKEERYEIKDLLSHAFFAEDTGVRVELAEEDHGRKSTIALRLWVEDPKKLKGKPKDNGAIEFTFDLEKETPDEVAQEMIESGFFHESDVKIVAKSIRDRVALIQWRRERIWPALQPKEQQDVGSPDKARGPPVPLQVQVTYHAQAGQPGPPEPEEPEADQHLLPPTLPTSATSLASDSTFDSGQGSTVYSDSQSSQQSVMLGSLADAAPSPAQCVCSPPVSEGPVLPQSLPSLGAYQQPTAAPGLPVGSVPAPACPPSLQQHFPDPAMSFAPVLPPPSTPMPTGPGQPAPPGQQPPPLAQPTPLPQVLAPQPVVPLQPVPPHLPPYLAPASQVGAPAQLKPLQMPQAPLQPLAQVPPQMPPIPVVPPITPLAGIDGLPPALPDLPTATVPPVPPPQYFSPAVILPSLAAPLPPASPALPLQAVKLPHPPGAPLAMPCRTIVPNAPATIPLLAVAPPGVAALSIHSAVAQLPGQPVYPAAFPQMAPTDVPPSPHHTVQNMRATPPQPALPPQPTLPPQPVLPPQPTLPPQPVLPPQPTRPPQPVLPPQPMLPPQPVLPPQPALPVRPEPLQPHLPEQAAPAATPGSQILLGHPAPYAVDVAAQVPTVPVPPAAVLSPPLPEVLLPAAPELLPQFPSSLATVSASVQSVPTQTATLLPPANPPLPGGPGIASPCPTVQLTVEPVQEEQASQDKPPGLPQSCESYGGSDVTSGKELSDSCEGAFGGGRLEGRAARKHHRRSTRARSRQERASRPRLTILNVCNTGDKMVECQLETHNHKMVTFKFDLDGDAPDEIATYMVEHDFILQAERETFIEQMKDVMDKAEDMLSEDTDADRGSDPGTSPPHLSTCGLGTGEESRQSQANAPVYQQNVLHTGKRWFIICPVAEHPAPEAPESSPPLPLSSLPPEASQDSAPYKDQLSSKEQPSFLASQQLLSQAGPSNPPGAPPAPLAPSSPPVTALPQDGAAPATSTMPEPASGTASQAGGPGTPQGLTSELETSQPLAETHEAPLAVQPLVVGLAPCTPAPEAASTRDASAPREPLPPPAPEPSPHSGTPQPALGQPAPLLPAAVGAVSLATSQLPSPPLGPTVPPQPPSALESDGEGPPPRVGFVDSTIKSLDEKLRTLLYQEHVPTSSASAGTPVEVGDRDFTLEPLRGDQPRSEVCGGDLALPPVPKEAVSGRVQLPQPLVEKSELAPTRGAVMEQGTSSSMTAESSPRSMLGYDRDGRQVASDSHVVPSVPQDVPAFVRPARVEPTDRDGGEAGESSAEPPPSDMGTVGGQASHPQTLGARALGSPRKRPEQQDVSSPAKTVGRFSVVSTQDEWTLASPHSLRYSAPPDVYLDEAPSSPDVKLAVRRAQTASSIEVGVGEPVSSDSGDEGPRARPPVQKQASLPVSGSVAGDFVKKATAFLQRPSRAGSLGPETPSRVGMKVPTISVTSFHSQSSYISSDNDSELEDADIKKELQSLREKHLKEISELQSQQKQEIEALYRRLGKPLPPNVGFFHTAPPTGRRRKTSKSKLKAGKLLNPLVRQLKVVASSTGHLADSSRGPPAKDPAQASVGLTADSTGLSGKAVQTQQPCSVRASLSSDICSGLASDGGGARGQGWTVYHPTSERVTYKSSSKPRARFLSGPVSVSIWSALKRLCLGKEHSSRSSTSSLAPGPEPGPQPALHVQAQVNNSNNKKGTFTDDLHKLVDEWTSKTVGAAQLKPTLNQLKQTQKLQDMEAQAGWAAPGEARAMTAPRAGVGMPRLPPAPGPLSTTVIPGAAPTLSVPTPDPESEKPD

SEQ ID NO: 573 - protein, 1742 aa, Homo sapiens
MAVAELYTQYNRVWIPDPEEVWKSAEIAKDYRVGDKVLRLLLEDGTELDYSVNPESLPPLRNPDILVGENDLTALSYLHEPAVLHNLRIRFAESKLIYTYSGIILVAMNPYKQLPIYGDAIIHAYSGQNMGDMDPHIFAVAEEAYKQMARNNRNQSIIVSGESGAGKTVSARYAMRYFATVSKSGSNAHVEDKVLASNPITEAVGNAKTTRNDNSSRFGKYTEISFDEQNQIIGANMSTYLLEKSRVVFQSENERNYHIFYQLCASAQQSEFKHLKLGSAEEFNYTRMGGNTVIEGVNDRAEMVETQKTFTLLGFKEDFQMDVFKILAAILHLGNVQITAVGNERSSVSEDDSHLKVFCELLGLESGRVAQWLCNRKIVTSSETVVKPMTRPQAVNARDALAKKIYAHLFDFIVERINQALQFSGKQHTFIGVLDIYGFETFDVNSFEQFCINYANEKLQQQFNMHVFKLEQEEYMKEDIPWTLIDFYDNQPVIDLIEAKMGILELLDEECLLPHGTDENWLQKLYNNFVNRNPLFEKPRMSNTSFVIQHFADKVEYKCEGFLEKNRDTVYDMLVEILRASKFHLCANFFQENPTPPSPFGSMITVKSAKQVIKPNSKHFRTTVGSKFRSSLYLLMETLNATTPHYVRCIKPNDEKLPFEFDSKRIVQQLRACGVLETIRISAQSYPSRWTYIEFYSRYGILMTKQELSFSDKKEVCKVVLHRLIQDSNQYQFGKTKIFFRAGQVAYLEKLRLDKLRQSCVMVQKHMRGWLQRKKFLRERRAALIIQQYFRGQQTVRKAITAVALKEAWAAIIIQKHCRGYLVRSLYQLIRMATITMQAYSRGFLARRRYRKMLEEHKAVILQKYARAWLARRRFQSIRRFVLNIQLTYRVQRLQKKLEDQNKENHGLVEKLTSLAALRAGDVEKIQKLEAELEKAATHRRNYEEKGKRYRDAVEEKLAKLQKHNSELETQKEQIQLKLQEKTEELKEKMDNLTKQLFDDVQKEERQRMLLEKSFELKTQDYEKQIQSLKEEIKALKDEKMQLQHLVEGEHVTSDGLKAEVARLSKQVKTISEFEKEIELLQAQKIDVEKHVQSQKREMREKMSEITKQLLESYDIEDVRSRLSVEDLEHLNEDGELWFAYEGLKKATRVLESHFQSQKDCYEKEIEALNFKVVHLSQEINHLQKLFREENDINESIRHEVTRLTSENMMIPDFKQQISELEKQKQDLEIRLNEQAEKMKGKLEELSNQLHRSQEEEGTQRKALEAQNEIHTKEKEKLIDKIQEMQEASDHLKKQFETESEVKCNFRQEASRLTLENRDLEEELDMKDRVIKKLQDQVKTLSKTIGKANDVHSSSGPKEYLGMLQYKREDEAKLIQNLILDLKPRGVVVNMIPGLPAHILFMCVRYADSLNDANMLKSLMNSTINGIKQVVKEHLEDFEMLSFWLSNTCHFLNCLKQYSGEEEFMKHNSPQQNKNCLNNFDLSEYRQILSDVAIRIYHQFIIIMEKNIQPIIVPGMLEYESLQGISGLKPTGFRKRSSSIDDTDGYTMTSVLQQLSYFYTTMCQNGLDPELVRQAVKQLFFLIGAVTLNSLFLRKDMCSCRKGMQIRCNISYLEEWLKDKNLQNSLAKETLEPLSQAAWLLQVKKTTDSDAKEIYERCTSLSAVQIIKILNSYTPIDDFEKRVTPSFVRKVQALLNSREDSSQLMLDTKYLFQVTFPFTPSPHALEMIQIPSSFKLGFLNRL

SEQ ID NO: 574 - protein, 1357 aa, Homo sapiens
MEFYESAYFIVLIPSIVITVIFLFFWLFMKETLYDEVLAKQKREQKLIPTKTDKKKAEKKKNKKKEIQNGNLHESDSESVPRDFKLSDALAVEDDQVAPVPLNVVETSSSVRERKKKEKKQKPVLEEQVIKESDASKIPGKKVEPVPVTKQPTPPSEAAASKKKPGQKKSKNGSDDQDKKVETLMVPSKRQEALPLHQETKQESGSGKKKASSKKQKTENVFVDEPLIHATTYIPLMDNADSSPVVDKREVIDLLKPDQVEGIQKSGTKKLKTETDKENAEVKFKDFLLSLKTMMFSEDEALCVVDLLKEKSGVIQDALKKSSKGELTTLIHQLQEKDKLLAAVKEDAAATKDRCKQLTQEMMTEKERSNVVITRMKDRIGTLEKEHNVFQNKIHVSYQETQQMQMKFQQVREQMEAEIAHLKQENGILRDAVSNTTNQLESKQSAELNKLRQDYARLVNELTEKTGKLQQEEVQKKNAEQAATQLKVQLQEAERRWEEVQSYIRKRTAEHEAAQQDLQSKFVAKENEVQSLHSKLTDTLVSKQQLEQRLMQLMESEQKRVNKEESLQMQVQDILEQNEALKAQIQQFHSQIAAQTSASVLAEELHKVIAEKDKQIKQTEDSLASERDRLTSKEEELKDIQNMNFLLKAEVQKLQALANEQAAAAHELEKMQQSVYVKDDKIRLLEEQLQHEISNKMEEFKILNDQNKALKSEVQKLQTLVSEQPNKDVVEQMEKCIQEKDEKLKTVEELLETGLIQVATKEEELNAIRTENSSLTKEVQDLKAKQNDQVSFASLVEELKKVIHEKDGKIKSVEELLEAELLKVANKEKTVQDLKQEIKALKEEIGNVQLEKAQQLSITSKVQELQNLLKGKEEQMNTMKAVLEEKEKDLANTGKWLQDLQEENESLKAHVQEVAQHNLKEASSASQFEELEIVLKEKENELKRLEAMLKERESDLSSKTQLLQDVQDENKLFKSQIEQLKQQNYQQASSFPPHEELLKVISEREKEISGLWNELDSLKDAVEHQRKKNNDLREKNWEAMEALASTEKMLQDKVNKTSKERQQQVEAVELEAKEVLKKLFPKVSVPSNLSYGEWLHGFEKKAKECMAGTSGSEEVKVLEHKLKEADEMHTLLQLECEKYKSVLAETEGILQKLQRSVEQEENKWKVKVDESHKTIKQMQSSFTSSEQELERLRSENKDIENLRREREHLEMELEKAEMERSTYVTEVRELKDLLTELQKKLDDSYSEAVRQNEELNLLKAQLNETLTKLRTEQNERQKVAGDLHKAQQSLELIQSKIVKAAGDTTVIENSDVSPETESSEKETMSVSLNQTVTQLQQLLQAVNQQLTKEKEHYQVLE

SEQ ID NO: 575 - protein, 1962 aa, Homo sapiens
  MOD_RES (1402)..(1402): Any amino acid
MSLQFNGFVRCDHTVLPTELNGLLGFPWTVGQAPGAHCGGSEMQGSEVLTCAPMPWLVWAPGNHSEGSTLWLVLSPRPTRMGIHGAHGLAGPPIREGQHVHSGAGGQGTSRQHPLTLMGLWGYQEHGLSEARPGAVLDPTAHPGLGEVALGHPRLFPQLCGAEAIHRGLSPPDVCPPVCIHLSDPEERGALAAAQDQSCGASRTRRLLRDRALFPAVHTMSVGRRKLALLWALALALACTRHTGHAQDGSSESSYKHHPALSPIARGPSGVPLRGATVFPSLRTIPVVRASNPAHNGRVCSTWGSFHYKTFDGDVFRFPGLCNYVFSEHCGAAYEDFNIQLRRSQESAAPTLSRVLMKVDGVVIQLTKGSVLVNGHPVLLPFSQSGVLIQQSSSYTKVEARLGLVLMWNHDDSLLLELDTKYANKTCGLCGDFNGMPVVSELLSHNTKLTPMEFGNLQKMDDPTEQCQDPVPEPPRNCSTGFGICEELLHGQLFSGCVALVDVGSYLEACRQDLCFCEDTDLLSCVCHTLAEYSRQCTHAGGLPQDWRGPDFCPQKCPNNMQYHECRSPCADTCSNQEHSRACEDHCVAGCFCPEGTVLDDIGQTGCVPVSKCACVYNGAAYAPGATYSTDCTNCTCSGGRWSCQEVPCPGTCSVLGGAHFSTFDGKQYTVHGDCSYVLTKPCDSSAFTVLAELRRCGLTDSETCLKSVTLSLDGVQTVVVIKASGEVFLNQIYTQLPISAANVTIFRPSTFFIIAQTSLGLQLNLQLVPTMQLFMQLAPKLRGQTCGLCGNFNSIQADDFRTLSGVVEATAAAFFNTFKTQAACPNIRNSFEDPCSLSVENASTTSGPGTSLSPVPTTSTTSAPTTSTTSGPGTTPSPVPTTSTTSAPTTSTTSGPGTTPSPVPTTSTTPVSKTSTSHLSVSKTTHSQPVTSDCHPLCAWTKWFDVDFPSPGPHGGDKETYNNIIRSGEKICRRPEEITRLQCRAESHPEVNIEHLGQVVQCSREEGLVCRNQDQQGPFKMCLNYEVRVLCCETPRGCPVTSVTPYGTSPTNALYPSLSTSMVSASVASTSVASSSVASSSVAYSTQTCFCNVADRLYPAGSTIYRHRDLAGHCYYALCSQDCQVVRGVDSDCPSTTLPPAPATSPSISTSEPVTELGCPNAVPPRKKGETWATPNCSEATCEGNNVISLRPRTCPRVEKPTCANGYPAVKVADQDGCCHHYQCQCVCSGWGDPHYITFDGTYYTFLDNCTYVLVQQIVPVYGHFRVLVDNYFCGAEDGLSCPRSIILEYHQDRVVLTRKPVHGVMTNEIIFNNKVVSPGFRKNGIVVSRIGVKMYATIPELGVQVMFSGLIFSVEVPFSKFANNTEGQCGTCTNDRKDECRTPRGTVVASCSEMSGSGTXAYPDQPACHRPHPTPTTVGPTTVGSTTVGPTTVGSTTVGPTTPPAPCLPSPICQLILSKVFEPCHTVIPPLLFYEGCVFDRCHMTDLDVVCSSLELYAALCASHDICIDWRGRTGHMCPFTCPADKVYQPCGPSNPSYCYGNDSASLGALPEAGPITEGCFCPEGMTLFSTSAQVCVPTGCPRCLGPHGEPVKVGHTVGMDCQECTCEAATWTLTCRPKLCPLPPACPLPGFVPVPAAPQAGQCCPQYSCACNTSRCPAPVGCPEGARAIPTYQEGACCPVQNCSWTVCSINGTLYQPGAVVSSSLCETCRCELPGGPPSDAFVVSCETQICNTHCPVGFEYQEQSGQCCGTCVQVACVTNTSKSPAHLFYPGETWSDAGNHCVTHQCEKHQDGLVVVTTKKACPPLSCSLDEARMSKDGCCRFCPPPPPPYQNQSTCAVYHRSLIIQQQGCSSSEPVRLAYCRGNCGDSSSMYSLEGNTVEHRCQCCQELRTSLRNVTLHCTDGSSRAFSYTEVEECGCMGRRCPAPGDTQHSEEAEPEPSQEAESGSWERGVPVSPMH

SEQ ID NO: 576 - protein, 1942 aa, Homo sapiens
MEDRRAEKSCEQACESLKRQDYEMALKHCTEALLSLGQYSMADFTGPCPLEIERIKIESLLYRIASFLQLKNYVQADEDCRHVLGEGLAKGEDAFRAVLCCMQLKGKLQPVSTILAKSLTGESLNGMVTKDLTRLKTLLSETETATSNALSGYHVEDLDEGSCNGWHFRPPPRGITSSEEYTLCKRFLEQGICRYGAQCTSAHSQEELAEWQKRYASRLIKLKQQNENKQLSGSYMETLIEKWMNSLSPEKVLSECIEGVKVEHNPDLSVTVSTKKSHQTWTFALTCKPARMLYRVALLYDAHRPHFSIIAISAGDSTTQVSQEVPENCQEWIGGKMAQNGLDHYVYKVGIAFNTEIFGTFRQTIVFDFGLEPVLMQRVMIDAASTEDLEYLMHAKQQLVTTAKRWDSSSKTIIDFEPNETTDLEKSLLIRYQIPLSADQLFTQSVLDKSLTKSNYQSRLHDLLYIEEIAQYKEISKFNLKVQLQILASFMLTGVSGGAKYAQNGQLFGRFKLTETLSEDTLAGRLVMTKVNAVYLLPVPKQKLVQTQGTKEKVYEATIEEKTKEYIFLRLSRECCEELNLRPDCDTQVELQFQLNRLPLCEMHYALDRIKDNGVLFPDISMTPTIPWSPNRQWDEQLDPRLNAKQKEAVLAITTPLAIQLPPVLIIGPYGTGKTFTLAQAVKHILQQQETRILICTHSNSAADLYIKDYLHPYVEAGNPQARPLRVYFRNRWVKTVHPVVHQYCLISSAHSTFQMPQKEDILKHRVVVVTLNTSQYLCQLDLEPGFFTHILLDEAAQAMECETIMPLALATQNTRIVLAGDHMQLSPFVYSEFARERNLHVSLLDRLYEHYPAEFPCRILLCENYRSHEAIINYTSELFYEGKLMASGKQPAHKDFYPLTFFTARGEDVQEKNSTAFYNNAEVFEVVERVEELRRKWPVAWGKLDDGSIGVVTPYADQVFRIRAELRKKRLSDVNVERVLNVQGKQFRVLFLSTVRTRHTCKHKQTPIKKKEQLLEDSTEDLDYGFLSNYKLLNTAITRAQSLVAVVGDPIALCSIGRCRKFWERFIALCHENSSLHGITFEQIKAQLEALELKKTYVLNPLAPEFIPRALRLQHSGSTNKQQQSPPKGKSLHHTQNDHFQNDGIVQPNPSVLIGNPIRAYTPPPPLGPHPNLGKSPSPVQRIDPHTGTSILYVPAVYGGNVVMSVPLPVPWTGYQGRFAVDPRIITHQAAMAYNMNLLQTHGRGSPIPYGLGHHPPVTIGQPQNQHQEKDQHEQNRNGKSDTNNSGPEINKIRTPEKKPTEPKQVDLESNPQNRSPESRPSVVYPSTKFPRKDNLNPRHINLPLPAPHAQYAIPNRHFHPLPQLPRPPFPIPQQHTLLNQQQNNLPEQPNQIPPQPNQVVQQQSQLNQQPQQPPPQLSPAYQAGPNNAFFNSAVAHRPQSPPAEAVIPEQQPPPMLQEGHSPLRAIAQPGPILPSHLNSFIDENPSGLPIGEALDRIHGSVALETLRQQQARFQQWSEHHAFLSQGSVPYPHHHHPHLQHLPQPPLGLHQPPVRADWKLTSSAEDEVETTYSRFQDLIRELSHRDQSETRELAEMPPPQSRLLQYRQVQSRSPPAVPSPPSSTDHSSHFSNFNDNSRDIEVASNPAFPQRLPPQIFNSPFSLPSEHLAPPPLKYLAPDGAWTFANLQQNHLMGPGFPYGLPPLPHRPPQNPFVQIQNHQHAIGQEPFHPLSSRTVSSSSLPSLEEYEPRGPGRPLYQRRISSSSVQPCSEEVSTPQDSLAQCKELQDHSNQSSFNFSSPESWVNTTSSTPYQNIPCNGSSRTAQPRELIAPPKTVKPPEDQLKSENLEVSSSFNYSVLQHLGQFPPLMPNKQIAESANSSSPQSSAGGKPAMSYASALRAPPKPRPPPEQAKKSSDPLSLFQELSLGSSSGSNGFYSYFK

SEQ ID NO: 577 - protein, 1834 aa, Homo sapiens
MKLSVNEAQLGFYLGSLSHLSACPGIDPRSSEDQPESLKTGQMMDESDEDFKELCASFFQRVKKHGIKEVSGERKTQKAASNGTQIRSKLKRTKQTATKTKTLQGPAEKKPPSGSQAPRTKKQRVTKWQASEPAHSVNGEGGVLASAPDPPVLRETAQNTQTGNQQEPSPNLSREKTRENVPNSDSQPPPSCLTTAVPSPSKPRTAQLVLQRMQQFKRADPERLRHASEECSLEAAREENVPKDPQEEMMAGNVYGLGPPAPESDAAVALTLQQEFARVGASAHDDSLEEKGLFFCQICQKNLSAMNVTRREQHVNRCLDEAEKTLRPSVPQIPECPICGKPFLTLKSRTSHLKQCAVKMEVGPQLLLQAVRLQTAQPEGSSSPPMFSFSDHSRGLKRRGPTSKKEPRKRRKVDEAPSEDLLVAMALSRSEMEPGAAVPALRLESAFSERIRPEAENKSRKKKPPVSPPLLLVQDSETTGRQIEDRVALLLSEEVELSSTPPLPASRILKEGWERAGQCPPPPERKQSFLWEGSALTGAWAMEDFYTARLVPPLVPQRPAQGLMQEPVPPLVPPEHSELSERRSPALHGTPTAGCGSRGPSPSASQREHQALQDLVDLAREGLSASPWPGSGGLAGSEGTAGLDVVPGGLPLTGFVVPSQDKHPDRGGRTLLSLGLLVADFGAMVNNPHLSDVQFQTDSGEVLYAHKFVLYARCPLLIQYVNNEGFSAVEDGVLTQRVLLGDVSTEAARTFLHYLYTADTGLPPGLSSELSSLAHRFGVSELVHLCEQVPIATDSEGKPWEEKEAENCESRAENFQELLRSMWADEEEEAETLLKSKDHEEDQENVNEAEMEEIYEFAATQRKLLQEERAAGAGEDADWLEGGSPVSGQLLAGVQVQKQWDKVEEMEPLEPGRDEAATTWEKMGQCALPPPQGQHSGARGAEAPEQEAPEEALGHSSCSSPSRDCQAERKEGSLPHSDDAGDYEQLFSSTQGEISEPSQITSEPEEQSGAVRERGLEVSHRLAPWQASPPHPCRFLLGPPQGGSPRGSHHTSGSSLSTPRSRGGTSQVGSPTLLSPAVPSKQKRDRSILTLSKEPGHQKGKERRSVLECRNKGVLMFPEKSPSIDLTQSNPDHSSSRSQKSSSKLNEEDEVILLLDSDEELELEQTKMKSISSDPLEEKKALEISPRSCELFSIIDVDADQEPSQSPPRSEAVLQQEDEGALPENRGSLGRRGAPWLFCDRESSPSEASTTDTSWLVPATPLASRSRDCSSQTQISSLRSGLAVQAVTQHTPRASVGNREGNEVAQKFSVIRPQTPPPQTPSSCLTPVSPGTSDGRRQGHRSPSRPHPGGHPHSSPLAPHPISGDRAHFSRRFLKHSPPGPSFLNQTPAGEVVEVGDSDDEQEVASHQANRSPPLDSDPPIPIDDCCWHMEPLSPIPIDHWNLERTGPLSTSSPSRRMNEAADSRDCRSPGLLDTTPIRGSCTTQRKLQEKSSGAGSLGNSRPSFLNSALWDVWDGEEQRPPETPPPAQMPSAGGAQKPEGLETPKGANRKKNLPPKVPITPMPQYSIMETPVLKKELDRFGVRPLPKRQMVLKLKEIFQYTHQTLDSDSEDESQSSQPLLQAPHCQTLASQTYKPSRAGVHAQQEATTGPGAHRPKGPAKTKGPRHQRKHHESITPPSRSPTKEAPPGLNDDAQIPASQESVATSVDGSDSSLSSQSSSSCEFGAAFESAGEEEGEGEVSASQAAVQAADTDEALRCYIRSKPALYQKVLLYQPFELRELQAELRQNGLRVSSRRLLDFLDTHCITFTTAATRREKLQGRRRQPRGKKKVERN

SEQ ID NO: 578 - protein, 919 aa, Homo sapiens
MGLFRGFVFLLVLCLLHQSNTSFIKLNNNGFEDIVIVIDPSVPEDEKIIEQIEDMVTTASTYLFEATEKRFFFKNVSILIPENWKENPQYKRPKHENHKHADVIVAPPTLPGRDEPYTKQFTECGEKGEYIHFTPDLLLGKKQNEYGPPGKLFVHEWAHLRWGVFDEYNEDQPFYRAKSKKIEATRCSAGISGRNRVYKCQGGSCLSRACRIDSTTKLYGKDCQFFPDKVQTEKASIMFMQSIDSVVEFCNEKTHNQEAPSLQNIKCNFRSTWEVISNSEDFKNTIPMVTPPPPPVFSLLKISQRIVCLVLDKSGSMGGKDRLNRMNQAAKHFLLQTVENGSWVGMVHFDSTATIVNKLIQIKSSDERNTLMAGLPTYPLGGTSICSGIKYAFQVIGELHSQLDGSEVLLLTDGEDNTASSCIDEVKQSGAIVHFIALGRAADEAVIEMSKITGGSHFYVSDEAQNNGLIDAFGALTSGNTDLSQKSLQLESKGLTLNSNAWMNDTVIIDSTVGKDTFFLITWNSLPPSISLWDPSGTIMENFTVDATSKMAYLSIPGTAKVGTWAYNLQAKANPETLTITVTSRAANSSVPPITVNAKMNKDVNSFPSPMIVYAEILQGYVPVLGANVTAFIESQNGHTEVLELLDNGAGADSFKNDGVYSRYFTAYTENGRYSLKVRAHGGANTARLKLRPPLNRAAYIPGWVVNGEIEANPPRPEIDEDTQTTLEDFSRTASGGAFVVSQVPSLPLPDQYPPSQITDLDATVHEDKIILTWTAPGDNFDVGKVQRYIIRISASILDLRDSFDDALQVNTTDLSPKEANSKESFAFKPENISEENATHIFIAIKSIDKSNLTSKVSNIAQVTLFIPQANPDDIDPTPTPTPTPTPDKSHNSGVNISTLVLSVIGSVVIVNFILSTTI

SEQ ID NO: 579 - protein, 1953 aa, Homo sapiens
MGVKKKKEMQVAALTICHQDLETLKSFADVEGKNLASLLLHCVQLTDGVSQIHYIKQIVPLLEKADKNGMCDPTIQSCLDILAGIYLSLSLKNPLKKVLASSLNSLPDFFLPEAMHRFTSRLQEELNTTDLYSYRKVTDNISSCMENFNLGRASVNNLLKNVLHFLQKSLIEILEENRKCAGNHIIQTQLMNDLLVGIRVSMMLVQKVQDFQGNLWKTSDSPIWQNMCGLLSIFTKVLSDDDLLQTVQSTSGLAIILFIKTMFHPSEKIPHLISSVLLRSVDCTSVPEWFMSSCRSLCCGDISQSAVLFLCQGTLAMLDWQNGSMGRSGEALLLDTAHVLFTLSSQIKEPTLEMFLSRILASWTNSAIQVLESSSPSLTDSLNGNSSIVGRLLEYVYTHWEHPLDALRHQTKIMFKNLLQMHRLTVEGADFVPDPFFVELTESLLRLEWHIKGKYTCLGCLVECIGVEHILAIDKTIPSQILEVMGDQSLVPYASDLLETMFRNHKSHLKSQTAESSWIDQWHETWVSPLLFILCEGNLDQKSYVIDYYLPKLLSYSPESLQYMVKILQTSIDAKTGQEQSFPSLGSCNSRGALGALMACLRIARAHGHLQSATDTWENLVSDARIKQGLIHQHCQVRIDTLGLLCESNRSTEIVSMEEMQWIQFFITYNLNSQSPGVRQQICSLLKKLFCRIQESSQVLYKLEQSKSKREPENELTKQHPSVSLQQYKNFMSSICNSLFEALFPGSSYSTRFSALTILGSIAEVFHVPEGRIYTVYQLSHDIDVGRFQTLMECFTSTFEDVKILAFDLLMKLSKTAVHFQDSGKLQGLFQAALELSTSTKPYDCVTASYLLNFLIWQDALPSSLSAYLTQQVACDNGDRPAAVVERNTLMVIKCLMENLEEEVSQAENSLLQAAAAFPMYGRVHCITGALQKLSLNSLQLVSEWRPVVEKLLLMSYRLSTVVSPVIQSSSPEGLIPMDTDSESASRLQMILNEIQPRDTNDYFNQAKILKEHDSFDMKDLNASVVNIDTSTEIKGKEVKTCDVTAQMVLVCCWRSMKEVALLLGMLCQLLPMQPVPESSDGLLTVEQVKEIGDYFKQHLLQSRHRGAFELAYTGFVKLTEVLNRCPNVSLQKLPEQWLWSVLEEIKCSDPSSKLCATRRSAGIPFYIQALLASEPKKGRMDLLKITMKELISLAGPTDDIQSTVPQVHALNILRALFRDTRLGENIIPYVADGAKAAILGFTSPVWAVRNSSTLLFSALITRIFGVKRAKDEHSKTNRMTGREFFSRFPELYPFLLKQLETVANTVDSDMGEPNRHPSMFLLLLVLERLYASPMDGTSSALSMGPFVPFIMRCGHSPVYHSREMAARALVPFVMIDHIPNTIRTLLSTLPSCTDQCFRQNHIHGTLLQVFHLLQAYSDSKHGTNSDFQHELTDITVCTKAKLWLAKRQNPCLVTRAVYIDILFLLTCCLNRSAKDNQPVLESLGFWEEVRGIISGSELITGFPWAFKVPGLPQYLQSLTRLAIAAVWAAAAKSGERETNVPISFSQLLESAFPEVRSLTLEALLEKFLAAASGLGEKGVPPLLCNMGEKFLLLAMKENHPECFCKILKILHCMDPGEWLPQTEHCVHLTPKEFLIWTMDIASNERSEIQSVALRLASKVISHHMQTCVENRELIAAELKQWVQLVILSCEDHLPTESRLAVVEVLTSTTPLFLTNPHPILELQDTLALWKCVLTLLQSEEQAVRDAATETVTTAMSQENTCQSTEFAFCQVDASIALALALAVLCDLLQQWDQLAPGLPILLGWLLGESDDLVACVESMHQVEEDYLFEKAEVNFWAETLIFVKYLCKHLFCLLSKSGWRPPSPEMLCHLQRMVSEQCHLLSQFFRELPPAAEFVKTVEFTRLRIQEERTLACLRLLAFLEGKEGEDTLVLSVWDSYAESRQLTLPRTEAAC

SEQ ID NO: 580 - protein, 1481 aa, Homo sapiens
MSKTLKKKKHWLSKVQECAVSWAGPPGDFGAEIRGGAERGEFPYLGRLREEPGGGTCCVVSGKAPSPGDVLLEVNGTPVSGLTNRDTLAVIRHFREPIRLKTVKPGKVINKDLRHYLSLQFQKGSIDHKLQQVIRDNLYLRTIPCTTRAPRDGEVPGVDYNFISVEQFKALEESGALLESGTYDGNFYGTPKPPAEPSPFQPDPVDQVLFDNEFDAESQRKRTTSVSKMERMDSSLPEEEEDEDKEAINGSGNAENRERHSESSDWMKTVPSYNQTNSSMDFRNYMMRDETLEPLPKNWEMAYTDTGMIYFIDHNTKTTTWLDPRLCKKAKAPEDCEDGELPYGWEKIEDPQYGTYYVDHLNQKTQFENPVEEAKRKKQLGQVEIGSSKPDMEKSHFTRDPSQLKGVLVRASLKKSTMGFGFTIIGGDRPDEFLQVKNVLKDGPAAQDGKIAPGDVIVDINGNCVLGHTHADVVQMFQLVPVNQYVNLTLCRGYPLPDDSEDPVVDIVAATPVINGQSLTKGETCMNPQDFKPGAMVLEQNGKSGHTLTGDGLNGPSDASEQRVSMASSGSSQPELVTIPLIKGPKGFGFAIADSPTGQKVKMILDSQWCQGLQKGDIIKEIYHQNVQNLTHLQVVEVLKQFPVGADVPLLILRGGPPSPTKTAKMKTDKKENAGSLEAINEPIPQPMPFPPSIIRSGSPKLDPSEVYLKSKTLYEDKPPNTKDLDVFLRKQESGFGFRVLGGDGPDQSIYIGAIIPLGAAEKDGRLRAADELMCIDGIPVKGKSHKQVLDLMTTAARNGHVLLTVRRKIFYGEKQPEDDSSQAFISTQNGSPRLNRAEVPARPAPQEPYDVVLQRKENEGFGFVILTSKNKPPPGVIPHKIGRVIEGSPADRCGKLKVGDHISAVNGQSIVELSHDNIVQLIKDAGVTVTLTVIAEEEHHGPPSGTNSARQSPALQHRPMGQSQANHIPGDRSALEGEIGKDVSTSYRHSWSDHKHLAQPDTAVISVVGSRHNQNLGCYPVELERGPRGFGFSLRGGKEYNMGLFILRLAEDGPAIKDGRIHVGDQIVEINGEPTQGITHTRAIELIQAGGNKVLLLLRPGTGLIPDHGDWDINNPSSSNVIYDEQSPLPPSSHFASIFEESHVPVIEESLRVQICEKAEELKDIVPEKKSTLNENQPEIKHQSLLQKNVSKRDPPSSHGHSNKKNLLKVENGVTRRGRSVSPKKPASQHSEEHLDKIPSPLKNNPKRRPRDQSLSPSKGENKSCQVSTRAGSGQDQCRKSRGRSASPKKQQKIEGSKAPSNAEAKLLEGKSRRIAGYTGSNAEQIPDGKEKSDVIRKDAKQNQLEKSRTRSPEKKIKRMVEKSLPSKMTNKTTSKEVSENEKGKKVTTGETSSSNDKIGENVQLSEKRLKQEPEEKVVSNKTEDHKGKELEAADKNKETGRFKPESSSPVKKTLITPGPWKVPSGNKVTGTIGMAEKRQ

SEQ ID NO: 581 - protein, 1401 aa, Homo sapiens
MAPQMYEFHLPLSPEELLKSGGVNQYVVQEVLSIKHLPPQLRAFQAAFRAQGPLAMLQHFDTIYSILHHFRSIDPGLKEDTLQFLIKVVSRHSQELPAILDDTTLSGSDRNAHLNALKMNCYALIRLLESFETMASQTNLVDLDLGGKGKKARTKAAHGFDWEEERQPILQLLTQLLQLDIRHLWNHSIIEEEFVSLVTGCCYRLLENPTINHQKNRPTREAITHLLGVALTRYNHMLSATVKIIQMLQHFEHLAPVLVAAVSLWATDYGMKSIVGEIVREIGQKCPQELSRDPSGTKGFAAFLTELAERVPAILMSSMCILLDHLDGENYMMRNAVLAAMAEMVLQVLSGDQLEAAARDTRDQFLDTLQAHGHDVNSFVRSRVLQLFTRIVQQKALPLTRFQAVVALAVGRLADKSVLVCKNAIQLLASFLANNPFSCKLSDADLAGPLQKETQKLQEMRAQRRTAAASAVLDPEEEWEAMLPELKSTLQQLLQLPQGEEEIPEQIANTETTEDVKGRIYQLLAKASYKKAIILTREATGHFQESEPFSHIDPEESEETRLLNILGLIFKGPAASTQEKNPRESTGNMVTGQTVCKNKPNMSDPEESRGNDELVKQEMLVQYLQDAYSFSRKITEAIGIISKMMYENTTTVVQEVIEFFVMVFQFGVPQALFGVRRMLPLIWSKEPGVREAVLNAYRQLYLNPKGDSARAKAQALIQNLSLLLVDASVGTIQCLEEILCEFVQKDELKPAVTQLLWERATEKVACCPLERCSSVMLLGMMARGKPEIVGSNLDTLVSIGLDEKFPQDYRLAQQVCHAIANISDRRKPSLGKRHPPFRLPQEHRLFERLRETVTKGFVHPDPLWIPFKEVAVTLIYQLAEGPEVICAQILQGCAKQALEKLEEKRTSQEDPKESPAMLPTFLLMNLLSLAGDVALQQLVHLEQAVSGELCRRRVLREEQEHKTKDPKEKNTSSETTMEEELGLVGATADDTEAELIRGICEMELLDGKQTLAAFVPLLLKVCNNPGLYSNPDLSAAASLALGKFCMISATFCDSQLRLLFTMLEKSPLPIVRSNLMVATGDLAIRFPNLVDPWTPHLYARLRDPAQQVRKTAGLVMTHLILKDMVKVKGQVSEMAVLLIDPEPQIAALAKNFFNELSHKGNAIYNLLPDIISRLSDPELGVEEEPFHTIMKQLLSYITKDKQTESLVEKLCQRFRTSRTERQQRDLAYCVSQLPLTERGLRKMLDNFDCFGDKLSDESIFSAFLSVVGKLRRGAKPEGKAIIDEFEQKLRACHTRGLDGIKELEIGQAGSQRAPSAKKPSTGSRYQPLASTASDNDFVTPEPRRTTRRHPNTQQRASKKKPKVVFSSDESSEEDLSAEMTEDETPKKTTPILRASARRHRS

SEQ ID NO: 582 - protein, 1287 aa, Homo sapiens
MSGGGGGGGSAPSRFADYFVICGLDTETGLEPDELSALCQYIQASKARDGASPFISSTTEGENFEQTPLRRTFKSKVLARYPENVEWNPFDQDAVGMLCMPKGLAFKTQADPREPQFHAFIITREDGSRTFGFALTFYEEVTSKQICSAMQTLYHMHNAEYDVLHAPPADDRDQSSMEDGEDTPVTKLQRFNSYDISRDTLYVSKCICLITPMSFMKACRSVLEQLHQAVTSPQPPPLPLESYIYNVLYEVPLPPPGRSLKFSGVYGPIICQRPSTNELPLFDFPVKEVFELLGVENVFQLFTCALLEFQILLYSQHYQRLMTVAETITALMFPFQWQHVYVPILPASLLHFLDAPVPYLMGLHSNGLDDRSKLELPQEANLCFVDIDNHFIELPEDLPQFPNKLEFVQEVSEILMAFGIPPEGNLHCSESASKLKRLRASELVSDKRNGNIAGSPLHSYELLKENETIARLQALVKRTGVSLEKLEVREDPSSNKDLKVQCDEEELRIYQLNIQIREVFANRFTQMFADYEVFVIQPSQDKESWFTNREQMQNFDKASFLSDQPEPYLPFLSRFLETQMFASFIDNKIMCHDDDDKDPVLRVFDSRVDKIRLLNVRTPTLRTSMYQKCTTVDEAEKAIELRLAKIDHTAIHPHLLDMKIGQGKYEPGFFPKLQSDVLSTGPASNKWTKRNAPAQWRRKDRQKQHTEHLRLDNDQREKYIQEARTMGSTIRQPKLSNLSPSVIAQTNWKFVEGLLKECRNKTKRMLVEKMGREAVELGHGEVNITGVEENTLIASLCDLLERIWSHGLQVKQGKSALWSHLLHYQDNRQRKLTSGSLSTSGILLDSERRKSDASSLMPPLRISLIQDMRHIQNIGEIKTDVGKARAWVRLSMEKKLLSRHLKQLLSDHELTKKLYKRYAFLRCDDEKEQFLYHLLSFNAVDYFCFTNVFTTILIPYHILIVPSKKLGGSMFTANPWICISGELGETQIMQIPRNVLEMTFECQNLGKLTTVQIGHDNSGLYAKWLVEYVMVRNEITGHTYKFPCGRWLGKGMDDGSLERILVGELLTSQPEVDERPCRTPPLQQSPSVIRRLVTISPNNKPKLNTGQIQESIGEAVNGIVKHFHKPEKERGSLTLLLCGECGLVSALEQAFQHGFKSPRLFKNVFIWDFLEKAQTYYETLEKNEVVPEENWHTRARNFCRFVTAINNTPRNIGKDGKFQMLVCLGARDHLLHHWIALLADCPITAHMYEDVALIKDHTLVNSLIRVLQTLQEFNITLETSLVKGIDI

SEQ ID NO: 583 - protein, 1530 aa, Homo sapiens
MSHSHPAGLLAAYNSLMDKHLAGYFNNTRIRRHLLRSGLITRSGRILSEKEYKLNMMKRDHQKYIRECLAQAIFHKVLDMERYHQLEIKKKLETLARKERIQRFKGEHTRRSVENNMPILSPHPPVGPKSNRGHSVLVDEGHSSPLALTAPRPYTAPGNMQPPIRLQPLPSNPAVETVPKVTSRSRSKTSLLENEALFPIGGKKAVMKFRNSIGNSQRMNSYQLPNINSYMMPIPPPLPPTGKITRENRSETWRRRRFRPTTAPNGLEPLLTKDSRRIHKTSLHSNAAITMIYLGKNVHLSSDNPDFRDEIKVYQQHCGGENLCVYKGKLLEKETFQFISKRHHGFPFSLTFFLNGMQVNRLSSCCEYKHRKGSRLGGKRGYFGFVCVERSSPCYKCIIAMGLDKKPSLPKSRKEKSTEKGEELKKAEGKVRKEREYVIPKRNEIKENKTSVSAKFSAQEIKTGLKEVVTAVEEMTSKGKPGQEVLEDDQENTLKYEYEEDFEVDEEKQGEKSNEEGQADVQMNGIPQSPLDDKKDNLDPEKESETSSQKAPDARDNVKDENDGCSESELEEDKQDMKTASSTSSRSHPYSSDSEDESAVGDREAHTDSSTDESARRSSSQELSENDKPRKSHLPIEESLEIEIEDQEITKADVETKPMPIDESFENVLKEGTEKGTQEIAEGLSEKSGKHVSAEEKEKDKSKLWEESTAQVKDKKAGLPGLEEGGKDSLPLAYVLALGAPTMNFMVDETAAINSNKESQQLVQKTYTLEKKEAMEEDEAPQHRDADIVQGKGEAALWGEAGAVHEAPLRAWKPTAEQPELAEEFTEKREIPPGIERGAEGAAEAEGVRRLGEGGSDPIGQAAAKDAVGLSKDEAPEKQALMLTVLETDKAASEGEQGLEKAVLANEAAALNLEHLHEVAALREAATSEEGEAEGGVAVSDVGESEEEASIDLEDTGPMEDTASKREDGSEEAILGGEEPAKERKEVMRTETRLSPFTGEAEASRMQVSEGSPEEGSLAKEAFLCKEDVEGEEMVTEAEANREDDRKEILPKELDLARERRKAERPKTSLRKTDSEREEVTRANALKDEDAFKEEQKLKAEEGETETEVRAEEETKAPPNEMGSDAENEAPVEASELSDNPGLLGEDSLKETVVPIFEATPGFEKSLENITALRKEGGGERLSEARDTEHKDREELSSRENRALKEGHRQDGEGALAAPEAEPAGKVQAPEGLIPATGQAEELAAKDHDSCAGLEGRAEGQGGVDVVLRTQEAVAEEDPIMAEKFREEAVDEDPEEEEDKECTLETEAMQDRNSEGDGDMEGEGNTQKNEGMGGGRVVAVEVLHGGGETAETAAEEREVLAGSETAEEKTIANKASSFSDVAEEETWHQQDELVGKTAAAGKVVVEELARSGEEVPAAEEMTVTYTTEAGVGTPGALERKTSGLGQEQEEGSEGQEAATGSGDGRQETGAAEKFRLGLSREGERELSPESLQAMATLPVKPDFTETREKQQHMVQGESETADVSPNNVQV

SEQ ID NO: 584 - protein, 1274 aa, Homo sapiens
MSGSCAAPGPGSGSSPAACRFAHYFVLCGIDADSGLEPDELAGENFDQSPLRRTFKSKVLAHYPQNIEWNPFDQDAVNMLCMPKGLSFRTQTDNKDPQFHSFIITREDGSRTYGFVLTFYEEVTSKQICTAMQTLYQMHNAEHYSSVYASSSCSMDSLASSLDEGDTTSLLKLQRYNSYDISRDTLYVSKSICLITPLPFMQACKKFLIQLYKAVTSQQPPPLPLESYIHNILYEVPLPPPGRSLKFYGVYEPVICQRPGPSELPLSDYPLREAFELLGLENLVQVFTCVLLEMQILLYSQDYQRLMTVAEGITTLLFPFQWQHVYVPILPASLLHFLDAPVPYLMGLQSKEGTDRSKLELPQEANLCFVDIDNHFIELPEEFPQFPNKVDFIQELSEVLVQFGIPPEGSLHCSESTSKLKNMVLKDLVNDKKNGNVCTNNISMYELLKGNETIARLQALAKRTGVAVEKMDLSASLGEKDKDLKLHCEEAELRDYQLNVQLREVFANRFTQMFADYEAFVIQTAQDMESWLTNREQMQNFDKASFLSDQPEPYLPFLSRFIETQMFATFIDNKIMSQWEEKDPLLRVFDTRIDKIRLYNVRAPTLRTSIYQKCSTLKEAAQSIEQRLMKMDHTAIHPHLLDMKIGQGKYEQGFFPKLQSDVLATGPTSNNRWVSRSATAQRRKERLRQHSEHVGLDNDLREKYMQEARSLGKNLRQPKLSDLSPAVIAQTNCKFVEGLLKECRMKTKRMLVEKMGHEAVELGHGEANITGLEENTLIASLCDLLERIWSHGLQVKQGKSALWSHLIQFQDREEKQEHLAESPVALGPERRKSDSGVMLPTLRVSLIQDMRHIQNMSEIKTDVGRARAWIRLSLEKKLLSQHLKQLLSNQPLTKKLYKRYAFLRCEEEREQFLYHLLSLNAVDYFCFTSVFTTIMIPYRSVIIPIKKLSNAIITSNPWICVSGELGDTGVMQIPKNLLEMTFECQNLGKLTTVQIGHDNSGLLAKWLVDCVMVRNEITGHTYRFPCGRWLGKGIDDGSLERILIGELMTSASDEDLVKQCRTPPQQKSPTTARRLSITSLTGKNNKPNAGQIQEGIGEAVNNIVKHFHKPEKERGSLTVLLCGENGLVAALEQVFHHGFKSARIFHKNVFIWDFIEKVVAYFETTDQILDNEDDVLIQKSSCKTFCHYVNAINTAPRNIGKDGKFQILVCLGTRDRLLPQWIPLLAECPAITRMYEESALLRDRMTVNSLIRILQTIQDFTIVLEGSLIKGVDV

SEQ ID NO: 585 - protein, 2364 aa, Homo sapiens
MTTTVATDYDNIEIQQQYSDVNNRWDVDDWDNENSSARLFERSRIKALADEREAVQKKTFTKWVNSHLARVSCRITDLYTDLRDGRMLIKLLEVLSGERLPKPTKGRMRIHCLENVDKALQFLKEQRVHLENMGSHDIVDGNHRLTLGLIWTIILRFQIQDISVETEDNKEKKSAKDALLLWCQMKTAGYPNVNIHNFTTSWRDGMAFNALIHKHRPDLIDFDKLKKSNAHYNLQNAFNLAEQHLGLTKLLDPEDISVDHPDEKSIITYVVTYYHYFSKMKALAVEGKRIGKVLDNAIETEKMIEKYESLASDLLEWIEQTIIILNNRKFANSLVGVQQQLQAFNTYRTVEKPPKFTEKGNLEVLLFTIQSKMRANNQKVYMPREGKLISDINKAWERLEKAEHERELALRNELIRQEKLEQLARRFDRKAAMRETWLSENQRLVSQDNFGFDLPAVEAATKKHEAIETDIAAYEERVQAVVAVARELEAENYHDIKRITARKDNVIRLWEYLLELLRARRQRLEMNLGLQKIFQEMLYIMDWMDEMKVLVLSQDYGKHLLGVEDLLQKHTLVEADIGIQAERVRGVNASAQKFATDGEGYKPCDPQVIRDRVAHMEFCYQELCQLAAERRARLEESRRLWKFFWEMAEEEGWIREKEKILSSDDYGKDLTSVMRLLSKHRAFEDEMSGRSGHFEQAIKEGEDMIAEEHFGSEKIRERIIYIREQWANLEQLSAIRKKRLEEASLLHQFQADADDIDAWMLDILKIVSSSDVGHDEYSTQSLVKKHKDVAEEIANYRPTLDTLHEQASALPQEHAESPDVRGRLSGIEERYKEVAELTRLRKQALQDTLALYKMFSEADACELWIDEKEQWLNNMQIPEKLEDLEVIQHRFESLEPEMNNQASRVAVVNQIARQLMHSGHPSEKEIKAQQDKLNTRWSQFRELVDRKKDALLSALSIQNYHLECNETKSWIREKTKVIESTQDLGNDLAGVMALQRKLTGMERDLVAIEAKLSDLQKEAEKLESEHPDQAQAILSRLAEISDVWEEMKTTLKNREASLGEASKLQQFLRDLDDFQSWLSRTQTAIASEDMPNTLTEAEKLLTQHENIKNEIDNYEEDYQKMRDMGEMVTQGQTDAQYMFLRQRLQALDTGWNELHKMWENRQNLLSQSHAYQQFLRDTKQAEAFLNNQEYVLAHTEMPTTLEGAEAAIKKQEDFMTTMDANEEKINAVVETGRRLVSDGNINSDRIQEKVDSIDDRHRKNRETASELLMRLKDNRDLQKFLQDCQELSLWINEKMLTAQDMSYDEARNLHSKWLKHQAFMAELASNKEWLDKIEKEGMQLISEKPETEAVVKEKLTGLHKMWEVLESTTQTKAQRLFDANKAELFTQSCADLDKWLHGLESQIQSDDYGKDLTSVNILLKKQQMLENQMEVRKKEIEELQSQAQALSQEGKSTDEVDSKRLTVQTKFMELLEPLNERKHNLLASKEIHQFNRDVEDEILWVGERMPLATSTDHGHNLQTVQLLIKKNQTLQKEIQGHQPRIDDIFERSQNIVTDSSSLSAEAIRQRLADLKQLWGLLIEETEKRHRRLEEAHRAQQYYFDAAEAEAWMSEQELYMMSEEKAKDEQSAVSMLKKHQILEQAVEDYAETVHQLSKTSRALVADSHPESERISMRQSKVDKLYAGLKDLAEERRGKLDERHRLFQLNREVDDLEQWIAEREVVAGSHELGQDYEHVTMLQERFREFARDTGNIGQERVDTVNHLADELINSGHSDAATIAEWKDGLNEAWADLLELIDTRTQILAASYELHKFYHDAKEIFGRIQDKHKKLPEELGRDQNTVETLQRMHTTFEHDIQALGTQVRQLQEDAARLQAAYAGDKADDIQKRENEVLEAWKSLLDACESRRVRLVDTGDKFRFFSMVRDLMLWMEDVIRQIEAQEKPRDVSSVELLMNNHQGIKAEIDARNDSFTTCIELGKSLLARKHYASEEIKEKLLQLTEKRKEMIDKWEDRWEWLRLILEVHQFSRDASVAEAWLLGQEPYLSSREIGQSVDEVEKLIKRHEAFEKSAATWDERFSALERLTTLELLEVRRQQEEEERKRRPPSPEPSTKVSEEAESQQQWDTSKGEQVSQNGLPAEQGSPRMAETVDTSEMVNGATEQRTSSKESSPIPSPTSDRKAKTALPAQSAATLPARTQETPSAQMEGFLNRKHEWEAHNKKASSRSWHNVYCVINNQEMGFYKDAKTAASGIPYHSEVPVSLKEAVCEVALDYKKKKHVFKLRLNDGNEYLFQAKDDEEMNTWIQAISSAISSDKHEVSASTQSTPASSRAQTLPTSVVTITSESSPGKREKDKEKDKEKRFSLFGKKK

SEQ ID NO: 586 - protein, 2548 aa, Homo sapiens
MNINDGGRRRFEDNEHTLRIYPGAISEGTIYCPIPARKNSTAAEVIESLINKLHLDKTKCYVLAEVKEFGGEEWILNPTDCPVQRMMLWPRMALENRLSGEDYRFLLREKNLDGSIHYGSLQSWLRVTEERRRMMERGFLPQPQQKDFDDLCSLPDLNEKTLLENLRNRFKHEKIYTYVGSILIVINPFKFLPIYNPKYVKMYDNHQLGKLEPHIYAVADVAYHAMLQRKKNQCIVISGESGSGKTQSTNFLIHHLTALSQKGFASGVEQIILGAGPVLEAFGNAKTAHNNNSSRFGKFIQVNYQETGTVLGAYVEKYLLEKSRLVYQEHNERNYHVFYYLLAGASEDERSAFHLKQPEEYHYLNQITKKPLRQSWDDYCYDSEPDCFTVEGEDLRHDFERLQLAMEMVGFLPKTRRQIFSLLSAILHLGNICYKKKTYRDDSIDICNPEVLPIVSELLEVKEEMLFEALVTRKTVTVGEKLILPYKLAEAVTVRNSMAKSLYSALFDWIVFRINHALLNSKDLEHNTKTLSIGVLDIFGFEDYENNSFEQFCINFANERLQHYFNQHIFKLEQEEYRTEGISWHNIDYIDNTCCINLISKKPTGLLHLLDEESNFPQATNQTLLDKFKHQHEDNSYIEFPAVMEPAFIIKHYAGKVKYGVKDFREKNTDHMRPDIVALLRSSKNAFISGMIGIDPVAVFRWAILRAFFRAMVAFREAGKRNIHRKTGHDDTAPCAILKSMDSFSFLQHPVHQRSLEILQRCKEEKYSITRKNPRTPLSDLQGMNALNEKNQHDTFDIAWNGRTGIRQSRLSSGTSLLDKDGIFANSTSSKLLERAHGILTRNKNFKSKPALPKHLLEVNSLKHLTRLTLQDRITKSLLHLHKKKKPPSISAQFQASLSKLMETLGQAEPYFVKCIRSNAEKLPLRFSDVLVLRQLRYTGMLETVRIRQSGYSSKYSFQDFVSHFHVLLPRNIIPSKFNIQDFFRKINLNPDNYQVGKTMVFLKEQERQHLQDLLHQEVLRRIILLQRWFRVLLCRQHFLHLRQASVIIQRFWRNYLNQKQVRDAAVQKDAFVMASAAALLQASWRAHLERQRYLELRAAAIVIQQKWRDYYRRRHMAAICIQARWKAYRESKRYQEQRKKIILLQSTCRGFRARQRFKALKEQRLRETKPEVGLVNIKGYGSLEIQGSDPSGWEDCSFDNRIKAIEECKSVIESNRISRESSVDCLKESPNKQQERAQSQSGVDLQEDVLVRERPRSLEDLHQKKVGRAKRESRRMRELEQAIFSLELLKVRSLGGISPSEDRRWSTELVPEGLQSPRGTPDSESSQGSLELLSYEESQKSKLESVISDEGDLQFPSPKISSSPKFDSRDNALSASNETSSAEHLKDGTMKEMVVCSSESITCKPQLKDSFISNSLPTFFYIPQQDPLKTNSQLDTSIQRNKLLENEDTAGEALTLDINRETRRYHCSGKDQIVPSLNTESSNPVLKKLEKLNTEKEERQKQLQQQNEKEMMEQIRQQTDILEKERKAFKTIEKPRIGECLVAPSSYQSKQRVERPSSLLSLNTSNKGELNVLGSLSLKDAALAQKDSSSAHLPPKDRPVTVFFERKGSPCQSSTVKELSKTDRMGTQLNVACKLSNNRISKREHFRPTQSYSHNSDDLSREGNARPIFFTPKDNMSIPLVSKEALNSKNPQLHKEDEPAWKPVKLAGPGQRETSQRFSSVDEQAKLHKTMSQGEITKLAVRQKASDSDIRPQRAKMRFWAKGKQGEKKTTRVKPTTQSEVSPLFAGTDVIPAHQFPDELAAYHPTPPLSPELPGSCRKEFKENKEPSPKAKRKRSVKISNVALDSMHWQNDSVQIIASVSDLKSMDEFLLKKVNDLDNEDSKKDTLVDVVFKKALKEFRQNIFSFYSSALAMDDGKSIRYKDLYALFEQILEKTMRLEQRDSLGESPVRVWVNTFKVFLDEYMNEFKTSDCTATKVPKTERKKRRKKETDLVEEHNGHIFKATQYSIPTYCEYCSSLIWIMDRASVCKLCKYACHKKCCLKTTAKCSKKYDPELSSRQFGVELSRLTSEDRTVPLVVEKLINYIEMHGLYTEGIYRKSGSTNKIKELRQGLDTDAESVNLDDYNIHVIASVFKQWLRDLPNPLMTFELYEEFLRAMGLQERKETIRGVYSVIDQLSRTHLNTLERLIFHLVRIALQEDTNRMSANALAIVFAPCILRCPDTTDPLQSVQDISKTTTCVELIVVEQMNKYKARLKDISSLEFAENKAKTRLSLIRRSMGKGRIRRGNYPGPSSPVVVRLPSVSDVSEETLTSEAAMETDITEQQQAAMQQEERVLTEQIENLQKEKEELTFEMLVLEPRASDDETLESEASIGTADSSENLNMESEYAISEKSERSLALSSLKTAGKSEPSSKLRKQLKKQQDSLDVVDSSVSSLCLSNTASSHGTRKLFQIYSKSPFYRAASGNEALGMEGPLGQTKFLEDKPQFISRGTFNPEKGKQKLKNVKNSPQKTKETPEGTVMSGRRKTVDPDCTSNQQLALFGNNEFMV

SEQ ID NO: 587 - protein, 1648 aa, Homo sapiens
MDDDSLDELVARSPGPDGHPQVGPADPAGDFEESSVGSSGDSGDDSDSEHGDGTDGEDEGASEEEDLEDRSGSEDSEDDGETLLEVAGTQGKLEAAGSFNSDDDAESCPICLNAFRDQAVGTPENCAHYFCLDCIVEWSKNANSCPVDRTLFKCICIRAQFGGKILRKIPVENTKASEEEEDPTFCEVCGRSDREDRLLLCDGCDAGYHMECLDPPLQEVPVDEWFCPECAAPGVVLAADAGPVSEEEVSLLLADVVPTTSRLRPRAGRTRAIARTRQSERVRATVNRNRISTARRVQHTPGRLGSSLLDEAIEAVATGLSTAVYQRPLTPRTPARRKRKTRRRKKVPGRKKTPSGPSAKSKSSATRSKKRQHRVKKRRGKKVKSEATTRSRIARTLGLRRPVHSSCIPSVLKPVEPSLGLLRADIGAASLSLFGDPYELDPFDSEELSANPLSPLSAKRRALSRSALQSHQPVARPVSVGLSRRRLPAAVPEPDLEEEPVPDLLGSILSGQSLLMLGSSDVIIHRDGSLSAKRAAPVSFQRNSGSLSRGEEGFKGCLQPRALPSGSPAQGPSGNRPQSTGLSCQGRSRTPARTAGAPVRLDLPAAPGAVQARNLSNGSVPGFRQSHSPWFNGTNKHTLPLASAASKISSRDSKPPCRSVVPGPPLKPAPRRTDISELPRIPKIRRDDGGGRRDAAPAHGQSIEIPSACISRLTGREGTGQPGRGTRAESEASSRVPREPGVHTGSSRPPAPSSHGSLAPLGPSRGKGVGSTFESFRINIPGNMAHSSQLSSPGFCNTFRPVDDKEQRKENPSPLFSIKKTKQLRSEVYDPSDPTGSDSSAPGSSPERSGPGLLPSEITRTISINSPKAQTVQAVRCVTSYTVESIFGTEPEPPLGPSSAMSKLRGAVAAEGASDTEREEPTESQGLAARLRRPSPPEPWDEEDGASCSTFFGSEERTVTCVTVVEPEAPPSPDVLQAATHRVVELRPPSRSRSTSSSRSRKKAKRKRVSREHGRTRSGTRSESRDRSSRSASPSVGEERPRRQRSKAKSRRSSSDRSSSRERAKRKKAKDKSREHRRGPWGHSRRTSRSRSGSPGSSSYEHYESRKKKKRRSASRPRGRECSPTSSLERLCRHKHQRERSHERPDRKESVAWPRDRRKRRSRSPSSEHRAREHRRPRSREKWPQTRSHSPERKGAVREASPAPLAQGEPGREDLPTRLPALGEAHVSPEVATADKAPLQAPPVLEVAAECEPDDLDLDYGDSVEAGHVFDDFSSDAVFIQLDDMSSPPSPESTDSSPERDFPLKPALPPASLAVAAIQREVSLMHDEDPSQPPPLPEGTQEPHLLRPDAAEKAEAPSSPDVAPAGKEDSPSASGRVQEAARPEEVVSQTPLLRSRALVKRVTWNLQESESSAPAEDRAPRAPLHRPQKPREGAWDMEDVAPTGVRQVFSELPFPSHVLPEPGFPDTDPSQVYSPGLPPAPAQPSSIPPCALVSQPTVQFILQGSLPLVGCGAAQTLAPVPAALTPASEPASQATAASNSEEKTPAPRLAAEKTKKEEYMKKLHMQERAVEEVKLAIKPFYQKREVTKEEYKDILRKAVQKICHSKSGEINPVKVANLVKAYVDKYRHMRRHKKPEAGEEPPTQGAEG

SEQ ID NO: 588 - protein, 1640 aa, Homo sapiens
MAQILPVRFQEHFQLQNLGINPANIGFSTLTMESDKFICIREKVGEQAQVTIIDMSDPMAPIRRPISAESAIMNPASKVIALKAGKTLQIFNIEMKSKMKAHTMAEEVIFWKWVSVNTVALVTETAVYHWSMEGDSQPMKMFDRHTSLVGCQVIHYRTDEYQKWLLLVGISAQQNRVVGAMQLYSVDRKVSQPIEGHAAAFAEFKMEGNAKPATLFCFAVRNPTGGKLHIIEVGQPAAGNQPFVKKAVDVFFPPEAQNDFPVAMQIGAKHGVIYLITKYGYLHLYDLESGVCICMNRISADTIFVTAPHKPTSGIIGVNKKGQVLSVCVEEDNIVNYATNVLQNPDLGLRLAVRSNLAGAEKLFVRKFNTLFAQGSYAEAAKVAASAPKGILRTRETVQKFQSIPAQSGQASPLLQYFGILLDQGQLNKLESLELCHLVLQQGRKQLLEKWLKEDKLECSEELGDLVKTTDPMLALSVYLRANVPSKVIQCFAETGQFQKIVLYAKKVGYTPDWIFLLRGVMKISPEQGLQFSRMLVQDEEPLANISQIVDIFMENSLIQQCTSFLLDALKNNRPAEGLLQTWLLEMNLVHAPQVADAILGNKMFTHYDRAHIAQLCEKAGLLQQALEHYTDLYDIKRAVVHTHLLNPEWLVNFFGSLSVEDSVECLHAMLSANIRQNLQLCVQVASKYHEQLGTQALVELFESFKSYKGLFYFLGSIVNFSQDPDVHLKYIQAACKTGQIKEVERICRESSCYNPERVKNFLKEAKLTDQLPLIIVCDRFGFVHDLVLYLYRNNLQRYIEIYVQKVNPSRTPAVIGGLLDVDCSEEVIKHLIMAVRGQFSTDELVAEVEKRNRLKLLLPWLESQIQEGCEEPATHNALAKIYIDSNNSPECFLRENAYYDSSVVGRYCEKRDPHLACVAYERGQCDLELIKVCNENSLFKSEARYLVCRKDPELWAHVLEETNPSRRQLIDQVVQTALSETRDPEEISVTVKAFMTADLPNELIELLEKIVLDNSVFSEHRNLQNLLILTAIKADRTRVMEYISRLDNYDALDIASIAVSSALYEEAFTVFHKFDMNASAIQVLIEHIGNLDRAYEFAERCNEPAVWSQLAQAQLQKDLVKEAINSYIRGDDPSSYLEVVQSASRSNNWEDLVKFLQMARKKGRESYIETELIFALAKTSRVSELEDFINGPNNAHIQQVGDRCYEEGMYEAAKLLYSNVSNFARLASTLVHLGEYQAAVDNSRKASSTRTWKEVCFACMDGQEFRFAQLCGLHIVIHADELEELMCYYQDRGYFEELILLLEAALGLERAHMGMFTELAILYSKFKPQKMLEHLELFWSRVNIPKVLRAAEQAHLWAELVFLYDKYEEYDNAVLTMMSHPTEAWKEGQFKDIITKVANVELCYRALQFYLDYKPLLINDLLLVLSPRLDHTWTVSFFSKAGQLPLVKPYLRSVQSHNNKSVNEALNHLLTEEEDYQGLRASIDAYDNFDNISLAQQLEKHQLMEFRCIAAYLYKGNNWWAQSVELCKKDHLYKDAMQHAAESRDAELAQKLLQWFLEEGKRECFAACLFTCYDLLRPDMVLELAWRHNLVDLAMPYFIQVMREYLSKVDKLDALESLRKQEEHVTEPAPLVFDFDGHE

SEQ ID NO: 589 - protein, 1020 aa, Homo sapiens
MGRGAGREYSPAATTAENGGGKKKQKEKELDELKKEVAMDDHKLSLDELGRKYQVDLSKGLTNQRAQDVLARDGPNALTPPPTTPEWVKFCRQLFGGFSILLWIGAILCFLAYGIQAAMEDEPSNDNLYLGVVLAAVVIVTGCFSYYQEAKSSKIMDSFKNMVPQQALVIREGEKMQINAEEVVVGDLVEVKGGDRVPADLRIISSHGCKVDNSSLTGESEPQTRSPEFTHENPLETRNICFFSTNCVEGTARGIVIATGDRTVMGRIATLASGLEVGRTPIAMEIEHFIQLITGVAVFLGVSFFVLSLILGYSWLEAVIFLIGIIVANVPEGLLATVTVCLTLTAKRMARKNCLVKNLEAVETLGSTSTICSDKTGTLTQNRMTVAHMWFDNQIHEADTTEDQSGATFDKRSPTWTALSRIAGLCNRAVFKAGQENISVSKRDTAGDASESALLKCIELSCGSVRKMRDRNPKVAEIPFNSTNKYQLSIHEREDSPQSHVLVMKGAPERILDRCSTILVQGKEIPLDKEMQDAFQNAYMELGGLGERVLGFCQLNLPSGKFPRGFKFDTDELNFPTEKLCFVGLMSMIDPPRAAVPDAVGKCRSAGIKVIMVTGDHPITAKAIAKGVGIISEGNETVEDIAARLNIPMSQVNPREAKACVVHGSDLKDMTSEQLDEILKNHTEIVFARTSPQQKLIIVEGCQRQGAIVAVTGDGVNDSPALKKADIGIAMGISGSDVSKQAADMILLDDNFASIVTGVEEGRLIFDNLKKSIAYTLTSNIPEITPFLLFIIANIPLPLGTVTILCIDLGTDMVPAISLAYEAAESDIMKRQPRNSQTDKLVNERLISMAYGQIGMIQALGGFFTYFVILAENGFLPSRLLGIRLDWDDRTMNDLEDSYGQEWTYEQRKVVEFTCHTAFFASIVVVQWADLIICKTRRNSVFQQGMKNKILIFGLLEETALAAFLSYCPGMGVALRMYPLKVTWWFCAFPYSLLIFIYDEVRKLILRRYPGGWVEKETYY

SEQ ID NO: 590 - protein, 1337 aa, Homo sapiens
MDFTAQPKPATALCGVVSADGKIAYPPGVKEITDKITTDEMIKRLKMVVKTFMDMDQDSEDEKQQYLPLALHLASEFFLRNPNKDVRLLVACCLADIFRIYAPEAPYTSHDKLKDIFLFITRQLKGLEDTKSPQFNRYFYLLENLAWVKSYNICFELEDCNEIFIQLFRTLFSVINNSHNKKVQMHMLDLMSSIIMEGDGVTQELLDSILINLIPAHKNLNKQSFDLAKVLLKRTVQTIEACIANFFNQVLVLGRSSVSDLSEHVFDLIQELFAIDPHLLLSVMPQLEFKLKSNDGEERLAVVRLLAKLFGSKDSDLATQNRPLWQCFLGRFNDIHVPVRLESVKFASHCLMNHPDLAKDLTEYLKVRSHDPEEAIRHDVIVTIITAAKRDLALVNDQLLGFVRERTLDKRWRVRKEAMMGLAQLYKKYCLHGEAGKEAAEKVSWIKDKLLHIYYQNSIDDKLLVEKIFAQYLVPHNLETEERMKCLYYLYASLDPNAVKALNEMWKCQNMLRSHVRELLDLHKQPTSEANCSAMFGKLMTIAKNLPDPGKAQDFVKKFNQVLGDDEKLRSQLELLISPTCSCKQADICVREIARKLANPKQPTNPFLEMVKFLLERIAPVHIDSEAISALVKLMNKSIEGTADDEEEGVSPDTAIRSGLELLKVLSFTHPTSFHSAETYESLLQCLRMEDDKVAEAAIQIFRNTGHKIETDLPQIRSTLIPILHQKAKRGTPHQAKQAVHCIHAIFTNKEVQLAQIFEPLSRSLNADVPEQLITPLVSLGHISMLAPDQFASPMKSVVANFIVKDLLMNDRSTGEKNGKLWSPDEEVSPEVLAKVQAIKLLVRWLLGMKNNQSKSANSTLRLLSAMLVSEGDLTEQKRISKSDMSRLRLAAGSAIMKLAQEPCYHEIITPEQFQLCALVINDECYQVRQIFAQKLHKALVKLLLPLEYMAIFALCAKDPVKERRAHARQCLLKNISIRREYIKQNPMATEKLLSLLPEYVVPYMIHLLAHDPDFTRSQDVDQLRDIKECLWFMLEVLMTKNENNSHAFMKKMAENIKLTRDAQSPDESKTNEKLYTVCDVALCVINSKSALCNADSPKDPVLPMKFFTQPEKDFCNDKSYISEETRVLLLTGKPKPAGVLGAVNKPLSATGRKPYVRSTGTETGSNINVNSELNPSTGNRSREQSSEAAETGVSENEENPVRIISVTPVKNIDPVKNKEINSDQATQGNISSDRGKKRTVTAAGAENIQQKTDEKVDESGPPAPSKPRRGRRPKSESQGNATKNDDLNKPINKGRKRAAVGQESPGGLEAGNAKAPKLQDLAKKAAPAERQIDLQR

SEQ ID NO: 591 - protein, 2322 aa, Homo sapiens
MQSGPRPPLPAPGLALALTLTMLARLASAASFFGENHLEVPVATALTDIDLQLQFSTSQPEALLLLAAGPADHLLLQLYSGRLQVRLVLGQEELRLQTPAETLLSDSIPHTVVLTVVEGWATLSVDGFLNASSAVPGAPLEVPYGLFVGGTGTLGLPYLRGTSRPLRGCLHAATLNGRSLLRPLTPDVHEGCAEEFSASDDVALGFSGPHSLAAFPAWGTQDEGTLEFTLTTQSRQAPLAFQAGGRRGDFIYVDIFEGHLRAVVEKGQGTVLLHNSVPVADGQPHEVSVHINAHRLEISVDQYPTHTSNRGVLSYLEPRGSLLLGGLDAEASRHLQEHRLGLTPEATNASLLGCMEDLSVNGQRRGLREALLTRNMAAGCRLEEEEYEDDAYGHYEAFSTLAPEAWPAMELPEPCVPEPGLPPVFANFTQLLTISPLVVAEGGTAWLEWRHVQPTLDLMEAELRKSQVLFSVTRGARHGELELDIPGAQARKMFTLLDVVNRKARFIHDGSEDTSDQLVLEVSVTARVPMPSCLRRGQTYLLPIQVNPVNDPPHIIFPHGSLMVILEHTQKPLGPEVFQAYDPDSACEGLTFQVLGTSSGLPVERRDQPGEPATEFSCRELEAGSLVYVHRGGPAQDLTFRVSDGLQASPPATLKVVAIRPAIQIHRSTGLRLAQGSAMPILPANLSVETNAVGQDVSVLFRVTGALQFGELQKQGAGGVEGAEWWATQAFHQRDVEQGRVRYLSTDPQHHAYDTVENLALEVQVGQEILSNLSFPVTIQRATVWMLRLEPLHTQNTQQETLTTAHLEATLEEAGPSPPTFHYEVVQAPRKGNLQLQGTRLSDGQGFTQDDIQAGRVTYGATARASEAVEDTFRFRVTAPPYFSPLYTFPIHIGGDPDAPVLTNVLLVVPEGGEGVLSADHLFVKSLNSASYLYEVMERPRHGRLAWRGTQDKTTMVTSFTNEDLLRGRLVYQHDDSETTEDDIPFVATRQGESSGDMAWEEVRGVFRVAIQPVNDHAPVQTISRIFHVARGGRRLLTTDDVAFSDADSGFADAQLVLTRKDLLFGSIVAVDEPTRPIYRFTQEDLRKRRVLFVHSGADRGWIQLQVSDGQHQATALLEVQASEPYLRVANGSSLVVPQGGQGTIDTAVLHLDTNLDIRSGDEVHYHVTAGPRWGQLVRAGQPATAFSQQDLLDGAVLYSHNGSLSPRDTMAFSVEAGPVHTDATLQVTIALEGPLAPLKLVRHKKIYVFQGEAAEIRRDQLEAAQEAVPPADIVFSVKSPPSAGYLVMVSRGALADEPPSLDPVQSFSQEAVDTGRVLYLHSRPEAWSDAFSLDVASGLGAPLEGVLVELEVLPAAIPLEAQNFSVPEGGSLTLAPPLLRVSGPYFPTLLGLSLQVLEPPQHGALQKEDGPQARTLSAFSWRMVEEQLIRYVHDGSETLTDSFVLMANASEMDRQSHPVAFTVTVLPVNDQPPILTTNTGLQMWEGATAPIPAEALRSTDGDSGSEDLVYTIEQPSNGRVVLRGAPGTEVRSFTQAQLDGGLVLFSHRGTLDGGFRFRLSDGEHTSPGHFFRVTAQKQVLLSLKGSQTLTVCPGSVQPLSSQTLRASSSAGTDPQLLLYRVVRGPQLGRLFHAQQDSTGEALVNFTQAEVYAGNILYEHEMPPEPFWEAHDTLELQLSSPPARDVAATLAVAVSFEAACPQRPSHLWKNKGLWVPEGQRARITVAALDASNLLASVPSPQRSEHDVLFQVTQFPSRGQLLVSEEPLHAGQPHFLQSQLAAGQLVYAHGGGGTQQDGFHFRAHLQGPAGASVAGPQTSEAFAITVRDVNERPPQPQASVPLRLTRGSRAPISRAQLSVVDPDSAPGEIEYEVQRAPHNGFLSLVGGGLGPVTRFTQADVDSGRLAFVANGSSVAGIFQLSMSDGASPPLPMSLAVDILPSAIEVQLRAPLEVPQALGRSSLSQQQLRVVSDREEPEAAYRLIQGPQYGHLLVGGRPTSAFSQFQIDQGEVVFAFTNFSSSHDHFRVLALARGVNASAVVNVTVRALLHVWAGGPWPQGATLRLDPTVLDAGELANRTGSVPRFRLLEGPRHGRVVRVPRARTEPGGSQLVEQFTQQDLEDGRLGLEVGRPEGRAPGPAGDSLTLELWAQGVPPAVASLDFATEPYNAARPYSVALLSVPEAARTEAGKPESSTPTGEPGPMASSPEPAVAKGGFLSFLEANMFSVIIPMCLVLLLLALILPLLFYLRKRNKTGKHDVQVLTAKPRNGLAGDTETFRKVEPGQAIPLTAVPGQGPPPGGQPDPELLQFCRTPNPALKNGQYWV

SEQ ID NO: 592 - protein, 1529 aa, Homo sapiens
MRGVGWQMLSLSLGLVLAILNKVAPQACPAQCSCSGSTVDCHGLALRSVPRNIPRNTERLDLNGNNITRITKTDFAGLRHLRVLQLMENKISTIERGAFQDLKELERLRLNRNHLQLFPELLFLGTAKLYRLDLSENQIQAIPRKAFRGAVDIKNLQLDYNQISCIEDGAFRALRDLEVLTLNNNNITRLSVASFNHMPKLRTFRLHSNNLYCDCHLAWLSDWLRQRPRVGLYTQCMGPSHLRGHNVAEVQKREFVCSGHQSFMAPSCSVLHCPAACTCSNNIVDCRGKGLTEIPTNLPETITEIRLEQNTIKVIPPGAFSPYKKLRRIDLSNNQISELAPDAFQGLRSLNSLVLYGNKITELPKSLFEGLFSLQLLLLNANKINCLRVDAFQDLHNLNLLSLYDNKLQTIAKGTFSPLRAIQTMHLAQNPFICDCHLKWLADYLHTNPIETSGARCTSPRRLANKRIGQIKSKKFRCSAKEQYFIPGTEDYRSKLSGDCFADLACPEKCRCEGTTVDCSNQKLNKIPEHIPQYTAELRLNNNEFTVLEATGIFKKLPQLRKINFSNNKITDIEEGAFEGASGVNEILLTSNRLENVQHKMFKGLESLKTLMLRSNRITCVGNDSFIGLSSVRLLSLYDNQITTVAPGAFDTLHSLSTLNLLANPFNCNCYLAWLGEWLRKKRIVTGNPRCQKPYFLKEIPIQDVAIQDFTCDDGNDDNSCSPLSRCPTECTCLDTVVRCSNKGLKVLPKGIPRDVTELYLDGNQFTLVPKELSNYKHLTLIDLSNNRISTLSNQSFSNMTQLLTLILSYNRLRCIPPRTFDGLKSLRLLSLHGNDISVVPEGAFNDLSALSHLAIGANPLYCDCNMQWLSDWVKSEYKEPGIARCAGPGEMADKLLLTTPSKKFTCQGPVDVNILAKCNPCLSNPCKNDGTCNSDPVDFYRCTCPYGFKGQDCDVPIHACISNPCKHGGTCHLKEGEEDGFWCICADGFEGENCEVNVDDCEDNDCENNSTCVDGINNYTCLCPPEYTGELCEEKLDFCAQDLNPCQHDSKCILTPKGFKCDCTPGYVGEHCDIDFDDCQDNKCKNGAHCTDAVNGYTCICPEGYSGLFCEFSPPMVLPRTSPCDNFDCQNGAQCIVRINEPICQCLPGYQGEKCEKLVSVNFINKESYLQIPSAKVRPQTNITLQIATDEDSGILLYKGDKDHIAVELYRGRVRASYDTGSHPASAIYSVETINDGNFHIVELLALDQSLSLSVDGGNPKIITNLSKQSTLNFDSPLYVGGMPGKSNVASLRQAPGQNGTSFHGCIRNLYINSELQDFQKVPMQTGILPGCEPCHKKVCAHGTCQPSSQAGFTCECQEGWMGPLCDQRTNDPCLGNKCVHGTCLPINAFSYSCKCLEGHGGVLCDEEEDLFNPCQAIKCKHGKCRLSGLGQPYCECSSGYTGDSCDREISCRGERIRDYYQKQQGYAACQTTKKVSRLECRGGCAGGQCCGPLRSKRRKYSFECTDGSSFVDEVEKVVKCGCTRCVS

SEQ ID NO: 593 - protein, 1431 aa, Homo sapiens
MGKEQELVQAVKAEDVGTAQRLLQRPRPGKAKLLGSTKKINVNFQDPDGFSALHHAALNGNTELISLLLEAQAAVDIKDNKGMRPLHYAAWQGRKEPMKLVLKAGSAVNIPSDEGHIPLHLAAQHGHYDVSEMLLQHQSNPCMVDNSGKTPLDLACEFGRVGVVQLLLSSNMCAALLEPRPGDATDPNGTSPLHLAAKNGHIDIIRLLLQAGIDINRQTKSGTALHEAALCGKTEVVRLLLDSGINAHVRNTYSQTALDIVHQFTTSQASREIKQLLREASAALQVRATKDYCNNYDLTSLNVKAGDIITVLEQHPDGRWKGCIHDNRTGNDRVGYFPSSLGEAIVKRAGSRAGTEPSLPQGSSSSGPSAPPEEIWVLRKPFAGGDRSGSISGMAGGRGSGGHALHAGSEGVKLLATVLSQKSVSESGPGDSPAKPPEGSAGVARSQPPVAHAGQVYGEQPPKKLEPASEGKSSEAVSQWLTAFQLQLYAPNFISAGYDLPTISRMTPEDLTAIGVTKPGHRKKIAAEISGLSIPDWLPEHKPANLAVWLSMIGLAQYYKVLVDNGYENIDFITDITWEDLQEIGITKLGHQKKLMLAVRKLAELQKAEYAKYEGGPLRRKAPQSLEVMAIESPPPPEPTPADCQSPKMTTFQDSELSDELQAAMTGPAEVGPTTEKPSSHLPPTPRATTRQDSSLGGRARHMSSSQELLGDGPPGPSSPMSRSQEYLLDEGPAPGTPPREARPGRHGHSIKRASVPPVPGKPRQVLPPGTSHFTPPQTPTKTRPGSPQALGGPHGPAPATAKVKPTPQLLPPTERPMSPRSLPQSPTHRGFAYVLPQPVEGEVGPAAPGPAPPPVPTAVPTLCLPPEADAEPGRPKKRAHSLNRYAASDSEPERDELLVPAAAGPYATVQRRVGRSHSVRAPAGADKNVNRSQSFAVRPRKKGPPPPPPKRSSSALASANLADEPVPDAEPEDGLLGVRAQCRRASDLAGSVDTGSAGSVKSIAAMLELSSIGGGGRAARRPPEGHPTPRPASPEPGRVATVLASVKHKEAIGPGGEVVNRRRTLSGPVTGLLATARRGPGESADPGPFVEDGTGRQRPRGPSKGEAGVEGPPLAKVEASATLKRRIRAKQNQQENVKFILTESDTVKRRPKAKEREAGPEPPPPLSVYHNGTGTVRRRPASEQAGPPELPPPPPPAEPPPTDLAHLPPLPPPEGEARKPAKPPVSPKPVLTQPVPKLQGSPTPTSKKVPLPGPGSPEVKRAHGTPPPVSPKPPPPPTAPKPVKAVAGLPSGSAGPSPAPSPARQPPAALAKPPGTPPSLGASPAKPPSPGAPALHVPAKPPRAAAAAAAAAAAPPAPPEGASPGDSARQKLEETSACLAAALQAVEEKIRQEDAQGPRDSAAEKSTGSILDDIGSMFDDLADQLDAMLE

SEQ ID NO: 594 - protein, 1534 aa, Homo sapiens
MALTPGWGSSAGPVRPELWLLLWAAAWRLGASACPALCTCTGTTVDCHGTGLQAIPKNIPRNTERLELNGNNITRIHKNDFAGLKQLRVLQLMENQIGAVERGAFDDMKELERLRLNRNQLHMLPELLFQNNQALSRLDLSENAIQAIPRKAFRGATDLKNLQLDKNQISCIEEGAFRALRGLEVLTLNNNNITTIPVSSFNHMPKLRTFRLHSNHLFCDCHLAWLSQWLRQRPTIGLFTQCSGPASLRGLNVAEVQKSEFSCSGQGEAGRVPTCTLSSGSCPAMCTCSNGIVDCRGKGLTAIPANLPETMTEIRLELNGIKSIPPGAFSPYRKLRRIDLSNNQIAEIAPDAFQGLRSLNSLVLYGNKITDLPRGVFGGLYTLQLLLLNANKINCIRPDAFQDLQNLSLLSLYDNKIQSLAKGTFTSLRAIQTLHLAQNPFICDCNLKWLADFLRTNPIETSGARCASPRRLANKRIGQIKSKKFRCSAKEQYFIPGTEDYQLNSECNSDVVCPHKCRCEANVVECSSLKLTKIPERIPQSTAELRLNNNEISILEATGMFKKLTHLKKINLSNNKVSEIEDGAFEGAASVSELHLTANQLESIRSGMFRGLDGLRTLMLRNNRISCIHNDSFTGLRNVRLLSLYDNQITTVSPGAFDTLQSLSTLNLLANPFNCNCQLAWLGGWLRKRKIVTGNPRCQNPDFLRQIPLQDVAFPDFRCEEGQEEGGCLPRPQCPQECACLDTVVRCSNKHLRALPKGIPKNVTELYLDGNQFTLVPGQLSTFKYLQLVDLSNNKISSLSNSSFTNMSQLTTLILSYNALQCIPPLAFQGLRSLRLLSLHGNDISTLQEGIFADVTSLSHLAIGANPLYCDCHLRWLSSWVKTGYKEPGIARCAGPQDMEGKLLLTTPAKKFECQGPPTLAVQAKCDLCLSSPCQNQGTCHNDPLEVYRCACPSGYKGRDCEVSLDSCSSGPCENGGTCHAQEGEDAPFTCSCPTGFEGPTCGVNTDDCVDHACANGGVCVDGVGNYTCQCPLQYEGKACEQLVDLCSPDLNPCQHEAQCVGTPDGPRCECMPGYAGDNCSENQDDCRDHRCQNGAQCMDEVNSYSCLCAEGYSGQLCEIPPHLPAPKSPCEGTECQNGANCVDQGNRPVCQCLPGFGGPECEKLLSVNFVDRDTYLQFTDLQNWPRANITLQVSTAEDNGILLYNGDNDHIAVELYQGHVRVSYDPGSYPSSAIYSAETINDGQFHTVELVAFDQMVNLSIDGGSPMTMDNFGKHYTLNSEAPLYVGGMPVDVNSAAFRLWQILNGTGFHGCIRNLYINNELQDFTKTQMKPGVVPGCEPCRKLYCLHGICQPNATPGPMCHCEAGWVGLHCDQPADGPCHGHKCVHGQCVPLDALSYSCQCQDGYSGALCNQAGALAEPCRGLQCLHGHCQASGTKGAHCVCDPGFSGELCEQESECRGDPVRDFHQVQRGYAICQTTRPLSWVECRGSCPGQGCCQGLRLKRRKFTFECSDGTSFAEEVEKPTKCGCALCA

SEQ ID NO: 595 - protein, 94 aa, Homo sapiens
MKRVLSCVPEPTVVMAARALCMLGLVLALLSSSSAEEYVGLSANQCAVPAKDRVDCGYPHVTPKECNNRGCCFDSRIPGVPWCFKPLQEAECTF

SEQ ID NO: 596 - protein, 2224 aa, Homo sapiens
MFPGCPRLWVLVVLGTSWVGWGSQGTEAAQLRQFYVAAQGISWSYRPEPTNSSLNLSVTSFKKIVYREYEPYFKKEKPQSTISGLLGPTLYAEVGDIIKVHFKNKADKPLSIHPQGIRYSKLSEGASYLDHTFPAEKMDDAVAPGREYTYEWSISEDSGPTHDDPPCLTHIYYSHENLIEDFNSGLIGPLLICKKGTLTEGGTQKTFDKQIVLLFAVFDESKSWSQSSSLMYTVNGYVNGTMPDITVCAHDHISWHLLGMSSGPELFSIHFNGQVLEQNHHKVSAITLVSATSTTANMTVGPEGKWIISSLTPKHLQAGMQAYIDIKNCPKKTRNLKKITREQRRHMKRWEYFIAAEEVIWDYAPVIPANMDKKYRSQHLDNFSNQIGKHYKKVMYTQYEDESFTKHTVNPNMKEDGILGPIIRAQVRDTLKIVFKNMASRPYSIYPHGVTFSPYEDEVNSSFTSGRNNTMIRAVQPGETYTYKWNILEFDEPTENDAQCLTRPYYSDVDIMRDIASGLIGLLLICKSRSLDRRGIQRAADIEQQAVFAVFDENKSWYLEDNINKFCENPDEVKRDDPKFYESNIMSTINGYVPESITTLGFCFDDTVQWHFCSVGTQNEILTIHFTGHSFIYGKRHEDTLTLFPMRGESVTVTMDNVGTWMLTSMNSSPRSKKLRLKFRDVKCIPDDDEDSYEIFEPPESTVMATRKMHDRLEPEDEESDADYDYQNRLAAALGIRSFRNSSLNQEEEEFNLTALALENGTEFVSSNTDIIVGSNYSSPSNISKFTVNNLAEPQKAPSHQQATTAGSPLRHLIGKNSVLNSSTAEHSSPYSEDPIEDPLQPDVTGIRLLSLGAGEFKSQEHAKHKGPKVERDQAAKHRFSWMKLLAHKVGRHLSQDTGSPSGMRPWEDLPSQDTGSPSRMRPWKDPPSDLLLLKQSNSSKILVGRWHLASEKGSYEIIQDTDEDTAVNNWLISPQNASRAWGESTPLANKPGKQSGHPKFPRVRHKSLQVRQDGGKSRLKKSQFLIKTRKKKKEKHTHHAPLSPRTFHPLRSEAYNTFSERRLKHSLVLHKSNETSLPTDLNQTLPSMDFGWIASLPDHNQNSSNDTGQASCPPGLYQTVPPEEHYQTFPIQDPDQMHSTSDPSHRSSSPELSEMLEYDRSHKSFPTDISQMSPSSEHEVWQTVISPDLSQVTLSPELSQTNLSPDLSHTTLSPELIQRNLSPALGQMPISPDLSHTTLSPDLSHTTLSLDLSQTNLSPELSQTNLSPALGQMPLSPDLSHTTLSLDFSQTNLSPELSHMTLSPELSQTNLSPALGQMPISPDLSHTTLSLDFSQTNLSPELSQTNLSPALGQMPLSPDPSHTTLSLDLSQTNLSPELSQTNLSPDLSEMPLFADLSQIPLTPDLDQMTLSPDLGETDLSPNFGQMSLSPDLSQVTLSPDISDTTLLPDLSQISPPPDLDQIFYPSESSQSLLLQEFNESFPYPDLGQMPSPSSPTLNDTFLSKEFNPLVIVGLSKDGTDYIEIIPKEEVQSSEDDYAEIDYVPYDDPYKTDVRTNINSSRDPDNIAAWYLRSNNGNRRNYYIAAEEISWDYSEFVQRETDIEDSDDIPEDTTYKKVVFRKYLDSTFTKRDPRGEYEEHLGILGPIIRAEVDDVIQVRFKNLASRPYSLHAHGLSYEKSSEGKTYEDDSPEWFKEDNAVQPNSSYTYVWHATERSGPESPGSACRAWAYYSAVNPEKDIHSGLIGPLLICQKGILHKDSNMPMDMREFVLLFMTFDEKKSWYYEKKSRSSWRLTSSEMKKSHEFHAINGMIYSLPGLKMYEQEWVRLHLLNIGGSQDIHVVHFHGQTLLENGNKQHQLGVWPLLPGSFKTLEMKASKPGWWLLNTEVGENQRAGMQTPFLIMDRDCRMPMGLSTGIISDSQIKASEFLGYWEPRLARLNNGGSYNAWSVEKLAAEFASKPWIQVDMQKEVIITGIQTQGAKHYLKSCYTTEFYVAYSSNQINWQIFKGNSTRNVMYFNGNSDASTIKENQFDPPIVARYIRISPTRAYNRPTLRLELQGCEVNGCSTPLGMENGKIENKQITASSFKKSWWGDYWEPFRARLNAQGRVNAWQAKANNNKQWLEIDLLKIKKITAIITQGCKSLSSEMYVKSYTIHYSEQGVEWKPYRLKSSMVDKIFEGNTNTKGHVKNFFNPPIISRFIRVIPKTWNQSIALRLELFGCDIY

SEQ ID NO: 597 - protein, 1905 aa, Homo sapiens
MQSRLLLLGAPGGHGGPASRRMRLLLRQVVQRRPGGDRQRPEVRLLHAGSGADTGDTVNIGDVSYKLKIPKNPELVPQNYISDSLAQSVVQHLRWIMQKDLLGQDVFLIGPPGPLRRSIAMQYLELTKREVEYIALSRDTTETDLKQRREIRAGTAFYIDQCAVRAATEGRTLILEGLEKAERNVLPVLNNLLENREMQLEDGRFLMSAERYDKLLRDHTKKELDSWKIVRVSENFRVIALGLPVPRYSGNPLDPPLRSRFQARDIYYLPFKDQLKLLYSIGANVSAEKVSQLLSFATTLCSQESSTLGLPDFPLDSLAAAVQILDSFPMMPIKHAIQWLYPYSILLGHEGKMAVEGVLKRFELQDSGSSLLPKEIVKVEKMMENHVSQASVTIRIADKEVTIKVPAGTRLLSQPCASDRFIQTLSHKQLQAEMMQSHMVKDICLIGGKGCGKTVIAKNFADTLGYNIEPIMLYQDMTARDLLQQRYTLPNGDTAWRSSPLVNAALEGKLVLLDGIHRVNAGTLAVLQRLIHDRELSLYDGSRLLREDRYMRLKEELQLSDEQLQKRSIFPIHPSFRIIALAEPPVIGSTAHQWLGPEFLTMFFFHYMKPLVKSEEIQVIKEKVPNVPQEALDKLLSFTHKLRETQDPTAQSLAASLSTRQLLRISRRLSQYPNENLHSAVTKACLSRFLPSLARSALEKNLADATIEINTDDNLEPELKDYKCEVTSGTLRIGAVSAPIYNAHEKMKVPDVLFYDNIQHVIVMEDMLKDFLLGEHLLLVGNQGVGKNKIVDRFLHLLNRPREYIQLHRDTTVQTLTLQPSVKDGLIVYEDSPLVKAVKLGHILVVDEADKAPTNVTCILKTLVENGEMILADGRRIVANSANVNGRENVVVIHPDFRMIVLANRPGFPFLGNDFFGTLGDIFSCHAVDNPKPHSELEMLRQYGPNVPEPILQKLVAAFGELRSLADQGIINYPYSTREVVNIVKHLQKFPTEGLSSVVRNVFDFDSYNNDMREILINTLHKYGIPIGAKPTSVQLAKELTLPEQTFMGYWTIGQARSGMQKLLCPVETHHIDIKGPALINIQEYPIERHEERSLNFTEECASWRIPLDEINIICDIATSHENEQNTLYVVTCNPASLYFMNMTGKSGFFVDFFDIFPRTANGVWHPFVTVAPLGSPLKGQVVLHEQQSNVILLLDTTGRALHRLILPSEKFTSKKPFWWNKEEAETYKMCKEFSHKNWLVFYKEKGNSLTVLDVLEGRTHTISLPINLKTVFLVAEDKWLLVESKTNQKYLLTKPAHIESEGSGVCQLYVLKEEPPSTGFGVTQETEFSIPHKISSDQLSSEHLSSAVEQKIASPNRILSDEKNYATIVVGFPDLMSPSEVYSWKRPSSLHKRSGTDTSFYRGKKKRGTPKQSNCVTLLDTNQVVRILPPGEVPLKDIYPKDVTPPQTSGYIEVTDLQSKKLRYIPIPRSESLSPYTTWLSTISDTDALLAEWDKSGVVTVDMGGHIRLWETGLERLQRSLMEWRNMIGQDDRNMQITINRDSGEDVSSPKHGKEDPDNMPHVGGNTWAGGTGGRDTAGLGGKGGPYRLDAGHTVYQVSQAEKDAVPEEVKRAAREMGQRAFQQRLKEIQMSEYDAATYERFSGAVRRQVHSLRIILDNLQAKGKERQWLRHQATGELDDAKIIDGLTGEKAIYKRRGELEPQLGSPQQKPKRLRLVVDVSGSMYRFNRMDGRLERTMEAVCMVMEAFENYEEKFQYDIVGHSGDGYNIGLVPMNKIPKDNKQRLEILKTMHAHSQFCMSGDHTLEGTEHAIKEIVKEEADEYFVIVLSDANLSRYGIHPAKFAQILTRDPQVNAFAIFIGSLGDQATRLQRTLPAGRSFVAMDTKDIPQILQQIFTSTMLSSV

SEQ ID NO: 598 - protein, 1941 aa, Homo sapiens
MAQGSGGREGALRTPAGGWHSPPSPDMQELLRSVERDLSIDPRQLAPAPGGTHVVALVPARWLASLRDRRLPLGPCPRAEGLGEAEVRTLLQRSVQRLPAGWTRVEVHGLRKRRLSYPLGGGLPFEDGSCGPETLTRFMQEVAAQNYRNLWRHAYHTYGQPYSHSPAPSAVPALDSVRQALQRVYGCSFLPVGETTQCPSYAREGPCPPRGSPACPSLLRAEALLESPEMLYVVHPYVQFSLHDVVTFSPAKLTNSQAKVLFILFRVLRAMDACHRQGLACGALSLYHIAVDEKLCSELRLDLSAYERPEEDENEEAPVARDEAGIVSQEEQGGQPGQPTGQEELRSLVLDWVHGRISNFHYLMQLNRLAGRRQGDPNYHPVLPWVVDFTTPHGRFRDLRKSKFRLNKGDKQLDFTYEMTRQAFVAGGAGGGEPPHVPHHISDVLSDITYYVYKARRTPRSVLCGHVRAQWEPHEYPASMERMQNWTPDECIPEFYTDPSIFRSIHPDMPDLDVPAWCSSSQEFVAAHRALLESREVSRDLHHWIDLTFGYKLQGKEAVKEKNVCLHLVDAHTHLASYGVVQLFDQPHPQRLAGAPALAPEPPLIPKLLVQTIQETTGREDFTENPGQLPNGVGRPVLEATPCEASWTRDRPVAGEDDLEQATEALDSISLAGKAGDQLGSSSQASPGLLSFSVASASRPGRRNKAAGADPGEGEEGRILLPEGFNPMQALEELEKTGNFLAKGLGGLLEVPEQPRVQPAVPLQCLLHRDMQALGVLLAEMVFATRVRTLQPDAPLWVRFQAVRGLCTRHPKEVPVSLQPVLDTLLQMSGPEVPMGAERGKLDQLFEYRPVSQGLPPPCPSQLLSPFSSVVPFPPYFPALHRFILLYQARRVEDEAQGRELVFALWQQLGAVLKDITPEGLEILLPFVLSLMSEEHTAVYTAWYLFEPVAKALGPKNANKYLLKPLIGAYESPCQLHGRFYLYTDCFVAQLMVRLGLQAFLTHLLPHVLQVLAGAEASQEESKDLAGAAEEEESGLPGAGPGSCAFGEEIPMDGEPPASSGLGLPDYTSGVSFHDQADLPETEDFQAGLYVTESPQPQEAEAVSLGRLSDKSSTSETSLGEERAPDEGGAPVDKSSLRSGDSSQDLKQSEGSEEEEEEEDSCVVLEEEEGEQEEVTGASELTLSDTVLSMETVVAGGSGGDGEEEEEALPEQSEGKEQKILLDTACKMVRWLSAKLGPTVASRHVARNLLRLLTSCYVGPTRQQFTVSSGESPPLSAGNIYQKRPVLGDIVSGPVLSCLLHIARLYGEPVLTYQYLPYISYLVAPGSASGPSRLNSRKEAGLLAAVTLTQKIIVYLSDTTLMDILPRISHEVLLPVLSFLTSLVTGFPSGAQARTILCVKTISLIALICLRIGQEMVQQHLSEPVATFFQVFSQLHELRQQDLKLDPAGRGEGQLPQVVFSDGQQRPVDPALLDELQKVFTLEMAYTIYVPFSCLLGDIIRKIIPNHELVGELAALYLESISPSSRNPASVEPTMPGTGPEWDPHGGGCPQDDGHSGTFGSVLVGNRIQIPNDSRPENPGPLGPISGVGGGGLGSGSDDNALKQELPRSVHGLSGNWLAYWQYEIGVSQQDAHFHFHQIRLQSFPGHSGAVKCVAPLSSEDFFLSGSKDRTVRLWPLYNYGDGTSETAPRLVYTQHRKSVFFVGQLEAPQHVVSCDGAVHVWDPFTGKTLRTVEPLDSRVPLTAVAVMPAPHTSITMASSDSTLRFVDCRKPGLQHEFRLGGGLNPGLVRALAISPSGRSVVAGFSSGFMVLLDTRTGLVLRGWPAHEGDILQIKAVEGSVLVSSSSDHSLTVWKELEQKPTHHYKSASDPIHTFDLYGSEVVTGTVSNKIGVCSLLEPPSQATTKLSSENFRGTLTSLALLPTKRHLLLGSDNGVIRLLA

SEQ ID NO: 599 - protein, 1857 aa, Homo sapiens
MEQLTTLPRPGDPGAMEPWALPTWHSWTPGRGGEPSSAAPSIADTPPAALQLQELRSEESSKPKGDGSSRPVGGTDPEGAEACLPSLGQQASSSGPACQRPEDEEVEAFLKAKLNMSFGDRPNLELLRALGELRQRCAILKEENQMLRKSSFPETEEKVRRLKRKNAELAVIAKRLEERARKLQETNLRVVSAPLPRPGTSLELCRKALARQRARDLSETASALLAKDKQIAALQRECRELQARLTLVGKEGPQWLHVRDFDRLLRESQREVLRLQRQIALRNQRETLPLPPSWPPGPALQARAGAPAPGAPGEATPQEDADNLPVILGEPEKEQRVQQLESELSKKRKKCESLEQEARKKQRRCEELELQLRQAQNENARLVEENSRLSGRATEKEQVEWENAELRGQLLGVTQERDSALRKSQGLQSKLESLEQVLKHMREVAQRRQQLEVEHEQARLSLREKQEEVRRLQQAQAEAQREHEGAVQLLESTLDSMQARVRELEEQCRSQTEQFSLLAQELQAFRLHPGPLDLLTSALDCGSLGDCPPPPCCCSIPQPCRGSGPKDLDLPPGSPGRCTPKSSEPAPATLTGVPRRTAKKAESLSNSSHSESIHNSPKSCPTPEVDTASEVEELEADSVSLLPAAPEGSRGGARIQVFLARYSYNPFEGPNENPEAELPLTAGEYIYIYGNMDEDGFFEGELMDGRRGLVPSNFVERVSDDDLLTSLPPELADLSHSSGPELSFLSVGGGGSSSGGQSSVGRSQPRPEEEDAGDELSLSPSPEGLGEPPAVPYPRRLVVLKQLAHSVVLAWEPPPEQVELHGFHICVNGELRQALGPGAPPKAVLENLDLWAGPLHISVQALTSRGSSDPLRCCLAVGARAGVVPSQLRVHRLTATSAEITWVPGNSNLAHAIYLNGEECPPASPSTYWATFCHLRPGTPYQAQVEAQLPPQGPWEPGWERLEQRAATLQFTTLPAGPPDAPLDVQIEPGPSPGILIISWLPVTIDAAGTSNGVRVTGYAIYADGQKIMEVASPTAGSVLVELSQLQLLQVCREVVVRTMSPHGESADSIPAPITPALAPASLPARVSCPSPHPSPEARAPLASASPGPGDPSSPLQHPAPLGTQEPPGAPPASPSREMAKGSHEDPPAPCSQEEAGAAVLGTSEERTASTSTLGEKDPGPAAPSLAKQEAEWTAGEACPASSSTQGARAQQAPNTEMCQGGDPGSGLRPRAEKEDTAELGVHLVNSLVDHGRNSDLSDIQEEEEEEEEEEEEELGSRTCSFQKQVAGNSIRENGAKSQPDPFCETDSDEEILEQILELPLQQFCSKKLFSIPEEEEEEEEDEEEEKSGAGCSSRDPGPPEPALLGLGCDSGQPRRPGQCPLSPESSRAGDCLEDMPGLVGGSSRRRGGGSPEKPPSRRRPPDPREHCSRLLSNNGPQASGRLGPTRERGGLPVIEGPRTGLEASGRGRLGPSRRCSRGRALEPGLASCLSPKCLEISIEYDSEDEQEAGSGGISITSSCYPGDGEAWGTATVGRPRGPPKANSGPKPYPRLPAWEKGEPERRGRSATGRAKEPLSRATETGEARGQDGSGRRGPQKRGVRVLRPSTAELVPARSPSETLAYQHLPVRIFVALFDYDPVSMSPNPDAGEEELPFREGQILKVFGDKDADGFYQGEGGGRTGYIPCNMVAEVAVDSPAGRQQLLQRGYLSPDILLEGSGNGPFVYSTAHTTGPPPKPRRSKKAESEGPAQPCPGPPKLVPSADLKAPHSMVAAFDYNPQESSPNMDVEAELPFRAGDVITVFGGMDDDGFYYGELNGQRGLVPSNFLEGPGPEAGGLDREPRTPQAESQRTRRRRVQC

SEQ ID NO: 600 - protein, 1445 aa, Homo sapiens
MQGPPLLTAAHLLCVCTAALAVAPGPRFLVTAPGIIRPGGNVTIGVELLEHCPSQVTVKAELLKTASNLTVSVLEAEGVFEKGSFKTLTLPSLPLNSADEIYELRVTGRTQDEILFSNSTRLSFETKRISVFIQTDKALYKPKQEVKFRIVTLFSDFKPYKTSLNILIKDPKSNLIQQWLSQQSDLGVISKTFQLSSHPILGDWSIQVQVNDQTYYQSFQVSEYVLPKFEVTLQTPLYCSMNSKHLNGTITAKYTYGKPVKGDVTLTFLPLSFWGKKKNITKTFKINGSANFSFNDEEMKNVMDSSNGLSEYLDLSSPGPVEILTTVTESVTGISRNVSTNVFFKQHDYIIEFFDYTTVLKPSLNFTATVKVTRADGNQLTLEERRNNVVITVTQRNYTEYWSGSNSGNQKMEAVQKINYTVPQSGTFKIEFPILEDSSELQLKAYFLGSKSSMAVHSLFKSPSKTYIQLKTRDENIKVGSPFELVVSGNKRLKELSYMVVSRGQLVAVGKQNSTMFSLTPENSWTPKACVIVYYIEDDGEIISDVLKIPVQLVFKNKIKLYWSKVKAEPSEKVSLRISVTQPDSIVGIVAVDKSVNLMNASNDITMENVVHELELYNTGYYLGMFMNSFAVFQECGLWVLTDANLTKDYIDGVYDNAEYAERFMEENEGHIVDIHDFSLGSSPHVRKHFPETWIWLDTNMGYRIYQEFEVTVPDSITSWVATGFVISEDLGLGLTTTPVELQAFQPFFIFLNLPYSVIRGEEFALEITIFNYLKDATEVKVIIEKSDKFDILMTSNEINATGHQQTLLVPSEDGATVLFPIRPTHLGEIPITVTALSPTASDAVTQMILVKAEGIEKSYSQSILLDLTDNRLQSTLKTLSFSFPPNTVTGSERVQITAIGDVLGPSINGLASLIRMPYGCGEQNMINFAPNIYILDYLTKKKQLTDNLKEKALSFMRQGYQRELLYQREDGSFSAFGNYDPSGSTWLSAFVLRCFLEADPYIDIDQNVLHRTYTWLKGHQKSNGEFWDPGRVIHSELQGGNKSPVTLTAYIVTSLLGYRKYQPNIDVQESIHFLESEFSRGISDNYTLALITYALSSVGSPKAKEALNMLTWRAEQEGGMQFWVSSESKLSDSWQPRSLDIEVAAYALLSHFLQFQTSEGIPIMRWLSRQRNSLGGFASTQDTTVALKALSEFAALMNTERTNIQVTVTGPSSPSPVKFLIDTHNRLLLQTAELAVVQPTAVNISANGFGFAICQLNVVYNVKASGSSRRRRSIQNQEAFDLDVAVKENKDDLNHVDLNVCTSFSGPGRSGMALMEVNLLSGFMVPSEAISLSETVKKVEYDHGKLNLYLDSVNETQFCVNIPAVRNFKVSNTQDASVSIVDYYEPRRQAVRSYNSEVKLSSCDLCSDVQGCRPCEDGASGSHHHSSVIFIFCFKLLYFMELWL

SEQ ID NO: 601 - protein, 1822 aa, Homo sapiens
MAGPRPSPWARLLLAALISVSLSGTLANRCKKAPVKSCTECVRVDKDCAYCTDEMFRDRRCNTQAELLAAGCQRESIVVMESSFQITEETQIDTTLRRSQMSPQGLRVRLRPGEERHFELEVFEPLESPVDLYILMDFSNSMSDDLDNLKKMGQNLARVLSQLTSDYTIGFGKFVDKVSVPQTDMRPEKLKEPWPNSDPPFSFKNVISLTEDVDEFRNKLQGERISGNLDAPEGGFDAILQTAVCTRDIGWRPDSTHLLVFSTESAFHYEADGANVLAGIMSRNDERCHLDTTGTYTQYRTQDYPSVPTLVRLLAKHNIIPIFAVTNYSYSYYEKLHTYFPVSSLGVLQEDSSNIVELLEEAFNRIRSNLDIRALDSPRGLRTEVTSKMFQKTRTGSFHIRRGEVGIYQVQLRALEHVDGTHVCQLPEDQKGNIHLKPSFSDGLKMDAGIICDVCTCELQKEVRSARCSFNGDFVCGQCVCSEGWSGQTCNCSTGSLSDIQPCLREGEDKPCSGRGECQCGHCVCYGEGRYEGQFCEYDNFQCPRTSGFLCNDRGRCSMGQCVCEPGWTGPSCDCPLSNATCIDSNGGICNGRGHCECGRCHCHQQSLYTDTICEINYSAIHPGLCEDLRSCVQCQAWGTGEKKGRTCEECNFKVKMVDELKRAEEVVVRCSFRDEDDDCTYSYTMEGDGAPGPNSTVLVHKKKDCPPGSFWWLIPLLLLLLPLLALLLLLCWKYCACCKACLALLPCCNRGHMVGFKEDHYMLRENLMASDHLDTPMLRSGNLKGRDVVRWKVTNNMQRPGFATHAASINPTELVPYGLSLRLARLCTENLLKPDTRECAQLRQEVEENLNEVYRQISGVHKLQQTKFRQQPNAGKKQDHTIVDTVLMAPRSAKPALLKLTEKQVEQRAFHDLKVAPGYYTLTADQDARGMVEFQEGVELVDVRVPLFIRPEDDDEKQLLVEAIDVPAGTATLGRRLVNITIIKEQARDVVSFEQPEFSVSRGDQVARIPVIRRVLDGGKSQVSYRTQDGTAQGNRDYIPVEGELLFQPGEAWKELQVKLLELQEVDSLLRGRQVRRFHVQLSNPKFGAHLGQPHSTTIIIRDPDELDRSFTSQMLSSQPPPHGDLGAPQNPNAKAAGSRKIHFNWLPPSGKPMGYRVKYWIQGDSESEAHLLDSKVPSVELTNLYPYCDYEMKVCAYGAQGEGPYSSLVSCRTHQEVPSEPGRLAFNVVSSTVTQLSWAEPAETNGEITAYEVCYGLVNDDNRPIGPMKKVLVDNPKNRMLLIENLRESQPYRYTVKARNGAGWGPEREAIINLATQPKRPMSIPIIPDIPIVDAQSGEDYDSFLMYSDDVLRSPSGSQRPSVSDDTGCGWKFEPLLGEELDLRRVTWRLPPELIPRLSASSGRSSDAEAPHGPPDDGGAGGKGGSLPRSATPGPPGEHLVNGRMDFAFPGSTNSLHRMTTTSAAAYGTHLSPHVPHRVLSTSSTLTRDYNSLTRSEHSHSTTLPRDYSTLTSVSSHDSRLTAGVPDTPTRLVFSALGPTSLRVSWQEPRCERPLQGYSVEYQLLNGGELHRLNIPNPAQTSVVVEDLLPNHSYVFRVRAQSQEGWGREREGVITIESQVHPQSPLCPLPGSAFTLSTPSAPGPLVFTALSPDSLQLSWERPRRPNGDIVGYLVTCEMAQGGGPATAFRVDGDSPESRLTVPGLSENVPYKFKVQARTTEGFGPEREGIITIESQDGGPFPQLGSRAGLFQHPLQSEYSSITTTHTSATEPFLVDGLTLGAQHLEAGGSLTRHVTQEFVSRTLTTSGTLSTHMDQQFFQT

SEQ ID NO: 602 - protein, 1539 aa, Homo sapiens
MDSYFKAAVSDLDKLLDDFEQNPDEQDYLQDVQNAYDSNHCSVSSELASSQRTSLLPKDQECVNSCASSETSYGTNESSLNEKTLKGLTSIQNEKNVTGLDLLSSVDGGTSDEIQPLYMGRCSKPICDLISDMGNLVHATNSEEDIKKLLPDDFKSNADSLIGLDLSSVSDTPCVSSTDHDSDTVREQQNDISSELQNREIGGIKELGIKVDTTLSDSYNYSGTENLKDKKIFNQLESIVDFNMSSALTRQSSKMFHAKDKLQHKSQPCGLLKDVGLVKEEVDVAVITAAECLKEEGKTSALTCSLPKNEDLCLNDSNSRDENFKLPDFSFQEDKTVIKQSAQEDSKSLDLKDNDVIQDSSSALHVSSKDVPSSLSCLPASGSMCGSLIESKARGDFLPQHEHKDNIQDAVTIHEEIQNSVVLGGEPFKENDLLKQEKCKSILLQSLIEGMEDRKIDPDQTVIRAESLDGGDTSSTVVESQEGLSGTHVPESSDCCEGFINTFSSNDMDGQDLDYFNIDEGAKSGPLISDAELDAFLTEQYLQTTNIKSFEENVNDSKSQMNQIDMKGLDDGNINNIYFNAEAGAIGESHGINIICETVDKQNTIENGLSLGEKSTIPVQQGLPTSKSEITNQLSVSDINSQSVGGARPKQLFSLPSRTRSSKDLNKPDVPDTIESEPSTADTVVPITCAIDSTADPQVSFNSNYIDIESNSEGGSSFVTANEDSVPENTCKEGLVLGQKQPTWVPDSEAPNCMNCQVKFTFTKRRHHCRACGKVFCGVCCNRKCKLQYLEKEARVCVVCYETISKAQAFERMMSPTGSNLKSNHSDECTTVQPPQENQTSSIPSPATLPVSALKQPGVEGLCSKEQKRVWFADGILPNGEVADTTKLSSGSKRCSEDFSPLSPDVPMTVNTVDHSHSTTVEKPNNETGDITRNEIIQSPISQVPSVEKLSMNTGNEGLPTSGSFTLDDDVFAETEEPSSPTGVLVNSNLPIASISDYRLLCDINKYVCNKISLLPNDEDSLPPLLVASGEKGSVPVVEEHPSHEQIILLLEGEGFHPVTFVLNANLLVNVKFIFYSSDKYWYFSTNGLHGLGQAEIIILLLCLPNEDTIPKDIFRLFITIYKDALKGKYIENLDNITFTESFLSSKDHGGFLFITPTFQKLDDLSLPSNPFLCGILIQKLEIPWAKVFPMRLMLRLGAEYKAYPAPLTSIRGRKPLFGEIGHTIMNLLVDLRNYQYTLHNIDQLLIHMEMGKSCIKIPRKKYSDVMKVLNSSNEHVISIGASFSTEADSHLVCIQNDGIYETQANSATGHPRKVTGASFVVFNGALKTSSGFLAKSSIVEDGLMVQITPETMNGLRLALREQKDFKITCGKVDAVDLREYVDICWVDAEEKGNKGVISSVDGISLQGFPSEKIKLEADFETDEKIVKCTEVFYFLKDQDLSILSTSYQFAKEIAMACSAALCPHLKTLKSNGMNKIGLRVSIDTDMVEFQAGSEGQLLPQHYLNDLDSALIPVIHGGTSNSSLPLEIELVFFIIEHLF

SEQ ID NO: 603 - protein, 1523 aa, Homo sapiens
MAPGWAGVGAAVRARLALALALASVLSGPPAVACPTKCTCSAASVDCHGLGLRAVPRGIPRNAERLDLDRNNITRITKMDFAGLKNLRVLHLEDNQVSVIERGAFQDLKQLERLRLNKNKLQVLPELLFQSTPKLTRLDLSENQIQGIPRKAFRGITDVKNLQLDNNHISCIEDGAFRALRDLEILTLNNNNISRILVTSFNHMPKIRTLRLHSNHLYCDCHLAWLSDWLRQRRTVGQFTLCMAPVHLRGFNVADVQKKEYVCPAPHSEPPSCNANSISCPSPCTCSNNIVDCRGKGLMEIPANLPEGIVEIRLEQNSIKAIPAGAFTQYKKLKRIDISKNQISDIAPDAFQGLKSLTSLVLYGNKITEIAKGLFDGLVSLQLLLLNANKINCLRVNTFQDLQNLNLLSLYDNKLQTISKGLFAPLQSIQTLHLAQNPFVCDCHLKWLADYLQDNPIETSGARCSSPRRLANKRISQIKSKKFRCSGSEDYRSRFSSECFMDLVCPEKCRCEGTIVDCSNQKLVRIPSHLPEYVTDLRLNDNEVSVLEATGIFKKLPNLRKINLSNNKIKEVREGAFDGAASVQELMLTGNQLETVHGRVFRGLSGLKTLMLRSNLIGCVSNDTFAGLSSVRLLSLYDNRITTITPGAFTTLVSLSTINLLSNPFNCNCHLAWLGKWLRKRRIVSGNPRCQKPFFLKEIPIQDVAIQDFTCDGNEESSCQLSPRCPEQCTCMETVVRCSNKGLRALPRGMPKDVTELYLEGNHLTAVPRELSALRHLTLIDLSNNSISMLTNYTFSNMSHLSTLILSYNRLRCIPVHAFNGLRSLRVLTLHGNDISSVPEGSFNDLTSLSHLALGTNPLHCDCSLRWLSEWVKAGYKEPGIARCSSPEPMADRLLLTTPTHRFQCKGPVDINIVAKCNACLSSPCKNNGTCTQDPVELYRCACPYSYKGKDCTVPINTCIQNPCQHGGTCHLSDSHKDGFSCSCPLGFEGQRCEINPDDCEDNDCENNATCVDGINNYVCICPPNYTGELCDEVIDHCVPELNLCQHEAKCIPLDKGFSCECVPGYSGKLCETDNDDCVAHKCRHGAQCVDTINGYTCTCPQGFSGPFCEHPPPMVLLQTSPCDQYECQNGAQCIVVQQEPTCRCPPGFAGPRCEKLITVNFVGKDSYVELASAKVRPQANISLQVATDKDNGILLYKGDNDPLALELYQGHVRLVYDSLSSPPTTVYSVETVNDGQFHSVELVTLNQTLNLVVDKGTPKSLGKLQKQPAVGINSPLYLGGIPTSTGLSALRQGTDRPLGGFHGCIHEVRINNELQDFKALPPQSLGVSPGCKSCTVCKHGLCRSVEKDSVVCECRPGWTGPLCDQEARDPCLGHRCHHGKCVATGTSYMCKCAEGYGGDLCDNKNDSANACSAFKCHHGQCHISDQGEPYCLCQPGFSGEHCQQENPCLGQVVREVIRRQKGYASCATASKVPIMECRGGCGPQCCQPTRSKRRKYVFQCTDGSSFVEEVERHLECGCLACS

SEQ ID NO: 604 - protein, 1748 aa, Homo sapiens
MARAWQHPFLNVFRHFRVDEWKRSAKQGDVAVVTDKTLKGAVYRIRGSVSAANYIQLPKSSTQSLGLTGRYLYVLFRPLPSKHFVIHLDVSSKDNQVIRVSFSNLFKEFKSTATWLQFPLVLEARTPQRDLVGLAPSGARWTCLQLDLQDVLLVYLNRCYGHLKSIRLCASLLVRNLYTSDLCFEPAISGAQWAKLPVTPMPREMAFPVPKGESWHDRYIHVRFPSESLKVPSKPIEKSCSPPEAVLLGPGPQPLPCPVASSKPVRFSVSPVVQTPSPTASGRAALAPRPFPEVSLSQERSDASNADGPGFHSLEPWAQLEASDIHTAAAGTHVLTHESAEVPVARTGSCEGFLPDPVLRLKGVIGFGGHGTRQALWTPDGAAVVYPCHAVIVVLLVDTGEQRFFLGHTDKVSALALDGSSSLLASAQARAPSVMRLWDFQTGRCLCLFRSPMHVVCSLSFSDSGALLCGVGKDHHGRTMVVAWGTGQVGLGGEVVVLAKAHTDFDVQAFRVTFFDETRMASCGQGSVRLWRLRGGVLRSCPVDLGEHHALQFTDLAFKQARDGCPEPSAAMLFVCSRSGHILEIDCQRMVVRHARRLLPTRTPGGPHPQKQTFSSGPGIAISSLSVSPAMCAVGSEDGFLRLWPLDFSSVLLEAEHEGPVSSVCVSPDGLRVLSATSSGHLGFLDTLSRVYHMLARSHTAPVLALAMEQRRGQLATVSQDRTVRIWDLATLQQLYDFTSSEDAPCAVTFHPTRPTFFCGFSSGAVRSFSLEAAEVLVEHTCHRGAVTGLTATPDGRLLFSSCSQGSLAQYSCADPQWHVLRVAADMVCPDAPASPSALAVSRDGRLLAFVGPSRCTVTVMGSASLDELLRVDIGTLDLASSRLDSAMAVCFGPAALGHLLVSTSSNRVVVLDAVSGRIIRELPGVHPEPCPSLTLSEDARFLLIAAGRTIKVWDYATQASPGPQVYIGHSEPVQAVAFSPDQQQVLSAGDAVFLWDVLAPTESDQSFPGAPPACKTGPGAGPLEDAASRASELPRQQVPKPCQASPPRLGVCARPPEGGDGARDTRNSGAPRTTYLASCKAFTPARVSCSPHSAKGTCPPPASGGWLRLKAVVGYSGNGRANMVWRPDTGFFAYTCGRLVVVEDLHSGAQQHWSGHSAEISTLALSHSAQVLASASGRSSTTAHCQIRVWDVSGGLCQHLIFPHSTTVLALAFSPDDRLLVTLGDHDGRTLALWGTATYDLVSSTRLPEPVHGVAFNPWDAGELTCVGQGTVTFWLLQQRGADISLQVRREPVPEAVGAGELTSLCYGAPPLLYCGTSSGQVCVWDTRAGRCFLSWEADDGGIGLLLFSGSRLVSGSSTGRLRLWAVGAVSELRCKGSGASSVFMEHELVLDGAVVSASFDDSVDMGVVGTTAGTLWFVSWAEGTSTRLISGHRSKVNEVVFSPGESHCATCSEDGSVRVWALASMELVIQFQVLNQSCLCLAWSPPCCGRPEQQRLAAGYGDGSLRIFSVSRTAMELKMHPHPVALTTVAFSTDGQTVLSGDKDGLVAVSHPCTGTTFRVLSDHQGAPISTICVTCKECEDLGVEGTDLWLAASGDQRVSVWASDWLRNHCELVDWLSFPMPATTETQGHLPPSLAAFCPWDGALLMYVGPGVYKEVIIYNLCQKQVVEKIPLPFFAMSLSLSPGTHLLAVGFAECMLRLVDCAMGTAQDFAGHDNAVHLCRFTPSARLLFTAARNEILVWEVPGL

SEQ ID NO: 605 - protein, 1052 aa, Homo sapiens
MMQATAVVETASGKGYHSNGGNLQKDKPSNPKKENLLLSSNGCDEVKLTFPDDDWNSSTLEQRANNKEISNIDKMDLLEPFFSVSQDTNTESTQFQSSELEDSTDYAFLNKTYSIPYSESKLKKESLTPLSSELDPEVQKKEEVFFNILEHQDKTVGLERIYNISDANYRESAEDTQKHDTDEDSQQEYHSAEEQEYISNHLSFDQTKALDISNPEVVELGNSGYEVKCASNVEDNRVNSGSGSIISFDSLDVYGQEESLHVSKFQNSVMLREYHDLKHEKYKEQETNSMYHTVFDGSVLRSNSPGNQESQSKSGSLSPQKVLKMKIYTENMKSQINEGKDFCGNKIVENKILLHLENPSTLPQDKALETLLQPCKDCQTSWTSVFDDSIISACGYYESLQNTADSALDFSAMLPKIAVRDNQAIEDNTSLKVAHSSTTKKTCFHNIGEMCTKSLTDAASCTVTINQTVDVSTDFRACFTTSRATSARPSVVSTSSNTEITMMNKKRPDEWQNEKQKSVACSTDWSYSEDCIDTQMAITKGSGKSLSVDSLKPNGNFLNKDFLELRKACGITDLKKHPEREFQLFKDTEKDLPSMCCQKIMQRAIKAELHLLNVHYQMCRRHCCDIYKLVMENREGLNMNLSSNSAKKELGSALLSLLGDLKVRYVTLKEKIHKGIPLEELPPLSLESKLLSTFSTFASRLMKKETHVFSEADAEQDNQRAHDVDVSSNLKKTLSQMSLSSDNSHATQNISPKKDDFKNGDINADFSQLKLGDKDCRHYQETSEDWSDAKESLTGVDVSGTQGNQVEQDTWNLDLTGEMKNVEPSQRDKGYLIHVGGLCPSVSEADLRSHFQKYQVSEISIYDSTNYRYASLAFTKNSDAKIAVKEMNGIEINGKSVNVWPVKILGEYTSPLSSKNGNRISSNNLEKSTNKQIHSEFSISRLPRTRPRQLGSEQDSEVFPSDQGVKKNCKQIESAKLLPDTPVQFIPPNTLNLRSFTKIIKRLAELHPEVSRDHIINALQEVRIRHKGFLNGLSITTIVEMTSSLLKNSASS

SEQ ID NO: 606 - protein, 1488 aa, Homo sapiens
MAEARKRRELLPLIYHHLLRAGYVRAAREVKEQSGQKCFLAQPVTLLDIYTHWQQTSELGRKRKAEEDAALQAKKTRVSDPISTSESSEEEEEAEAETAKATPRLASTNSSVLGADLPSSMKEKAKAETEKAGKTGNSMPHPATGKTVANLLSGKSPRKSAEPSANTTLVSETEEEGSVPAFGAAAKPGMVSAGQADSSSEDTSSSSDETDVEGKPSVKPAQVKASSVSTKESPARKAAPAPGKVGDVTPQVKGGALPPAKRAKKPEEESESSEEGSESEEEAPAGTRSQVKASEKILQVRAASAPAKGTPGKGATPAPPGKAGAVASQTKAGKPEEDSESSSEESSDSEEETPAAKALLQAKASGKTSQVGAASAPAKESPRKGAAPAPPGKTGPAVAKAQAGKREEDSQSSSEESDSEEEAPAQAKPSGKAPQVRAASAPAKESPRKGAAPAPPRKTGPAAAQVQVGKQEEDSRSSSEESDSDREALAAMNAAQVKPLGKSPQVKPASTMGMGPLGKGAGPVPPGKVGPATPSAQVGKWEEDSESSSEESSDSSDGEVPTAVAPAQEKSLGNILQAKPTSSPAKGPPQKAGPVAVQVKAEKPMDNSESSEESSDSADSEEAPAAMTAAQAKPALKIPQTKACPKKTNTTASAKVAPVRVGTQAPRKAGTATSPAGSSPAVAGGTQRPAEDSSSSEESDSEEEKTGLAVTVGQAKSVGKGLQVKAASVPVKGSLGQGTAPVLPGKTGPTVTQVKAEKQEDSESSEEESDSEEAAASPAQVKTSVKKTQAKANPAAARAPSAKGTISAPGKVVTAAAQAKQRSPSKVKPPVRNPQNSTVLARGPASVPSVGKAVATAAQAQTGPEEDSGSSEEESDSEEEAETLAQVKPSGKTHQIRAALAPAKESPRKGAAPTPPGKTGPSAAQAGKQDDSGSSSEESDSDGEAPAAVTSAQVIKPPLIFVDPNRSPAGPAATPAQAQAASTPRKARASESTARSSSSESEDEDVIPATQCLTPGIRTNVVTMPTAHPRIAPKASMAGASSSKESSRISDGKKQEGPATQVSKKNPASLPLTQAALKVLAQKASEAQPPVARTQPSSGVDSAVGTLPATSPQSTSVQAKGTNKLRKPKLPEVQQATKAPESSDDSEDSSDSSSGSEEDGEGPQGAKSAHTLGPTPSRTETLVEETAAESSEDDVVAPSQSLLSGYMTPGLTPANSQASKATPKLDSSPSVSSTLAAKDDPDGKQEAKPQQAAGMLSPKTGGKEAASGTTPQKSRKPKKGAGNPQASTLALQSNITQCLLGQPWPLNEAQVQASVVKVLTELLEQERKKVVDTTKESSRKGWESRKRKLSGDQPAARTPRSKKKKKLGAGEGGEASVSPEKTSTTSKGKAKRDKASGDVKEKKGKGSLGSQGAKDEPEEELQKGMGTVEGGDQSNPKSKKEKKKSDKRKKDKEKKEKKKKAKKASTKDSESPSQKKKKKKKKTAEQTV

SEQ ID NO: 607 - protein, 1127 aa, Homo sapiens
MAECGRGGAAGGALPTSPGPALGAKGALKAGVGEGGGGGGRLGHGRARYDSGGVSNGDCSLGVSGDEARASPTRGPRGVALAPTPSAVVCTLPRESKPGGLPRRSSIIKDGTKQKRERKKTVSFSSMPTEKKISSASDCINSMVEGSELKKVRSNSRIYHRYFLLDADMQSLRWEPSKKDSEKAKIDIKSIKEVRTGKNTDIFRSNGISDQISEDCAFSVIYGENYESLDLVANSADVANIWVTGLRYLISYGKHTLDMLESSQDNMRTSWVSQMFSEIDVDNLGHITLCNAVQCIRNLNPGLKTSKIELKFKELHKSKDKAGTEVTKEEFIEVFHELCTRPEIYFLLVQFSSNKEFLDTKDLMMFLEAEQGVAHINEEISLEIIHKYEPSKEGQEKGWLSIDGFTNYLMSPDCYIFDPEHKKVCQDMKQPLSHYFINSSHNTYLIEDQFRGPSDITGYIRALKMGCRSVELDVWDGPDNEPVIYTGHTMTSQIVFRSVIDIINKYAFFASEYPLILCLENHCSIKQQKVMVQHMKKLLGDKLYTTSPNVEESYLPSPDVLKGKILIKAKKLSSNCSGVEGDVTDEDEGAEMSQRMGKENMEQPNNVPVKRFQLCKELSELVSICKSVQFKEFQVSFQVQKYWEVCSFNEVLASKYANENPGDFVNYNKRFLARVFPSPMRIDSSNMNPQDFWKCGCQIVAMNFQTPGLMMDLNIGWFRQNGNCGYVLRPAIMREEVSFFSANTKDSVPGVSPQLLHIKIISGQNFPKPKGSGAKGDVVDPYVYVEIHGIPADCAEQRTKTVHQNGDAPIFDESFEFQINLPELAMVRFVVLDDDYIGDEFIGQYTIPFECLQTGYRHVPLQSLTGEVLAHASLFVHVAITNRRGGGKPHKRGLSVRKGKKSREYASLRTLWIKTVDEVFKNAQPPIRDATDLRENMQNAVVSFKELCGLSSVANLMQCMLAVSPRFLGPDNTPLVVLNLSEQYPTMELQGIVPEVLKKIVTTYDMMIQSLKALIENADAVYEKIVHCQKAAMEFHEHLHSIGTKEGLKERKLQKAVESFTWNITILKGQADLLKYAKNETLENLKQIHFAAVSCGLNKPGTENADVQKPRRSLEVIPEKANDETGE

SEQ ID NO: 608 - protein, 1609 aa, Homo sapiens
MNSPVDPGARQALRKKPPERTPEDLNTIYSYLHGMEILSNLREHQLRLMSARARYERYSGNQVLFCSETIARCWYILLSGSVLVKGSMVLPPCSFGKQFGGKRGCDCLVLEPSEMIVVENAKDNEDSILQREIPARQSRRRFRKINYKGERQTITDDVEVNSYLSLPADLTKMHLTENPHPQVTHVSSSQSGCSIASDSGSSSLSDIYQATESEVGDVDLTRLPEGPVDSEDDEEEDEEIDRTDPLQGRDLVRECLEKEPADKTDDDIEQLLEFMHQLPAFANMTMSVRRELCSVMIFEVVEQAGAIILEDGQELDSWYVILNGTVEISHPDGKVENLFMGNSFGITPTLDKQYMHGIVRTKVDDCQFVCIAQQDYWRILNHVEKNTHKVEEEGEIVMVHEHRELDRSGTRKGHIVIKATPERLIMHLIEEHSIVDPTYIEDFLLTYRTFLESPLDVGIKLLEWFKIDSLRDKVTRIVLLWVNNHFNDFEGDPAMTRFLEEFEKNLEDTKMNGHLRLLNIACAAKAKWRQVVLQKASRESPLQFSLNGGSEKGFGIFVEGVEPGSKAADSGLKRGDQIMEVNGQNFENITFMKAVEILRNNTHLALTVKTNIFVFKELLFRTEQEKSGVPHIPKIAEKKSNRHSIQHVPGDIEQTSQEKGSKKVKANTVSGGRNKIRKILDKTRFSILPPKLFSDGGLSQSQDDSIVGTRHCRHSLAIMPIPGTLSSSSPDLLQPTTSMLDFSNPSDIPDQVIRVFKVDQQSCYIIISKDTTAKEVVFHAVHEFGLTGASDTYSLCEVSVTPEGVIKQRRLPDQFSKLADRIQLNGRYYLKNNMETETLCSDEDAQELVKESQLSMLQLSTIEVATQLSMRDFDLFRNIEPTEYIDDLFKLNSKTGNTHLKRFEDIVNQETFWVASEILTEANQLKRMKIIKHFIKIALHCRECKNFNSMFAIISGLNLASVARLRGTWEKLPSKYEKHLQDLQDIFDPSRNMAKYRNILSSQSMQPPIIPLFPVVKKDMTFLHEGNDSKVDGLVNFEKLRMISKEIRQVVRMTSANMDPAMMFRQRKKRWRSLGSLSQGSTNSNMLDVQGGAHKKRARRSSLLNAKKLYEDAQMARKVKQYLSSLDVETDEEKFQMMSLQWEPAYGTLTKNLSEKRSAKSSEMSPVPMRSAGQTTKAHLHQPHRVSQVLQVPAVNLHPIRKKGQTKDPALNTSLPQKVLGTTEEISGKKHTEDTISVASSLHSSPPASPQGSPHKGYTLIPSAKSDNLSDSSHSEISSRSSIVSNCSVDSMSAALQDERCSSQALAVPESTGALEKTEHASGIGDHSQHGPGWTLLKPSLIKCLAVSSSVSNEEISQEHIIIEAADSGRGSWTSCSSSSHDNFQSLPNPKSWDFLNSYRHTHLDDPIAEVEPTDSEPYSCSKSCSRTCGQCKGSLERKSWTSSSSLSDTYEPNYGTVKQRVLESTPAESSEGLDPKDATDPVYKTVTSSTEKGLIVYCVTSPKKDDRYREPPPTPPGYLGISLADLKEGPHTHLKPPDYSVAVQRSKMMHNSLSRLPPASLSSNLVACVPSKIVTQPQRHNLQPFHPKLGDVTDADSEADENEQVSAV

SEQ ID NO: 609 - protein, 1493 aa, Homo sapiens
MPNEGIPHSSQTQEQDCLQSQPVSNNEEMAIKQESGGDGEVEEYLSFRSVGDGLSTSAVGCASAAPRRGPALLHIDRHQIQAVEPSAQALELQGLGVDVYDQDVLEQGVLQQVDNAIHEASRASQLVDVEKEYRSVLDDLTSCTTSLRQINKIIEQLSPQAATSRDINRKLDSVKRQKYNKEQQLKKITAKQKHLQAILGGAEVKIELDHASLEEDAEPGPSSLGSMLMPVQETAWEELIRTGQMTPFGTQIPQKQEKKPRKIMLNEASGFEKYLADQAKLSFERKKQGCNKRAARKAPAPVTPPAPVQNKNKPNKKARVLSKKEERLKKHIKKLQKRALQFQGKVGLPKARRPWESDMRPEAEGDSEGEESEYFPTEEEEEEEDDEVEGAEADLSGDGTDYELKPLPKGGKRQKKVPVQEIDDDFFPSSGEEAEAASVGEGGGGGRKVGRYRDDGDEDYYKQRLRRWNKLRLQDKEKRLKLEDDSEESDAEFDEGFKVPGFLFKKLFKYQQTGVRWLWELHCQQAGGILGDEMGLGKTIQIIAFLAGLSYSKIRTRGSNYRFEGLGPTVIVCPTTVMHQWVKEFHTWWPPFRVAILHETGSYTHKKEKLIRDVAHCHGILITSYSYIRLMQDDISRYDWHYVILDEGHKIRNPNAAVTLACKQFRTPHRIILSGSPMQNNLRELWSLFDFIFPGKLGTLPVFMEQFSVPITMGGYSNASPVQVKTAYKCACVLRDTINPYLLRRMKSDVKMSLSLPDKNEQVLFCRLTDEQHKVYQNFVDSKEVYRILNGEMQIFSGLIALRKICNHPDLFSGGPKNLKGLPDDELEEDQFGYWKRSGKMIVVESLLKIWHKQGQRVLLFSQSRQMLDILEVFLRAQKYTYLKMDGTTTIASRQPLITRYNEDTSIFVFLLTTRVGGLGVNLTGANRVVIYDPDWNPSTDTQARERAWRIGQKKQVTVYRLLTAGTIEEKIYHRQIFKQFLTNRVLKDPKQRRFFKSNDLYELFTLTSPDASQSTETSAIFAGTGSDVQTPKCHLKRRIQPAFGADHDVPKRKKFPASNISVNDATSSEEKSEAKGAEVNAVTSNRSDPLKDDPHMSSNVTSNDRLGEETNAVSGPEELSVISGNGECSNSSGTGKTSMPSGDESIDEKLGLSYKRERPSQAQTEAFWENKQMENNFYKHKSKTKHHSVAEEETLEKHLRPKQKPKNSKHCRDAKFEGTRIPHLVKKRRYQKQDSENKSEAKEQSNDDYVLEKLFKKSVGVHSVMKHDAIMDGASPDYVLVEAEANRVAQDALKALRLSRQRCLGAVSGVPTWTGHRGISGAPAGKKSRFGKKRNSNFSVQHPSSTSPTEKCQDGIMKKEGKDNVPEHFSGRAEDADSSSGPLASSSLLAKMRARNHLILPERLESESGHLQEASALLPTTEHDDLLVEMRNFIAFQAHTDGQASTREILQEFESKLSASQSCVFRELLRNLCTFHRTSGGEGIWKLKPEYC

SEQ ID NO: 610 - protein, 1432 aa, Homo sapiens
MQRGKPCRALPTLKCQTFCQRHGLMFEVVDLRWGIRNIEATDHLTTELCLEEVDRCWKTSIGPAFVALIGDQYGPCLIPSRIDEKEWEVLRDHLTARPSDLELVARYFQRDENAFPPTYVLQAPGTGEACEPEEATLTSVLRSGAQEARRLGLITQEQWQHYHRSVIEWEIERSLLSSEDREQGATVFLREIQDLHKHILEDCALRMVDRLADGCLDADAQNLLSSLKSHITDMHPGVLKTHRLPWSRDLVNPKNKTHACYLKELGEQFVVRANHQVLTRLRELDTAGQELAWLYQEIRHHLWQSSEVIQTFCGRQELLARLGQQLRHDDSKQHTPLVLFGPPGIGKTALMCKLAEQMPRLLGHKTVTVLRLLGTSQMSSDARGLLKSICFQVCLAYGLPLPPAQVLDAHTRVVQFFHTLLHTVSCRNFESLVLLLDAMDDLDSVRHARRVPWLPLNCPPRVHLILSACSGALGVLDTLQRVLLDPEAYWEVKPLSGNQGQQMIQLLLAAARRTLSPVHTDLLWASLPECGNPGRLRLAFEEARKWASFTVPVPLATTAEEATHQLCTRLEQTHGQLLVAHVLGYIVSSRHGLSEAELKDVLSLDDEVLQDVYRDWTPPSKELLRFPPLLWVRLRRDLGYYLARRPVDGFTLLAIAHRQLVEVVRERYLSGSERAKRHGVLADFFSGTWSQGTKKLITLPLVGKPLNLDRKVAPQPLWFSHTVANLRKLKELPYHLLHSGRLEELKQEVLGSMSWISCRGISGGIEDLLDDFDLCAPHLDSPEVGLVREALQLCRPAVELRGMERSLLYTELLARLHFFATSHPALVGQLCQQAQSWFQLCAHPVLVPLGGFLQPPGGPLRATLSGCHKGITAMAWGVEEKLLVIGTQDGIMAVWDMEEQHVIHMLTGHTGEVRCVKIFAKGTLANSASKDYTLHLWNLLSGQEKFTIWDGGSKNPAEPQIWNLHVDEAHKVVYSASGSKINAWNLETAEPVFHILGDASDPWMCMAVLASQATLLTVSRDGVVSLWSSATGKLQGKQHMSSIKEETPTCAVSVQKQGKLVTGFSNGSISLVSSKGDRLLEKLPDAVRFLVVSEDESLLAAGFGRSVRIFLADSRGFRRFMAMDLEHEDMVETAVFGTENNLIITGSLDALIQVWSLSEQGTLLDILEGVGAPVSLLARGGALVASASPQSSSFKVWDLSDAHRSRVPAPFLDRTGLTAVSHNGSYVYFPKIGDKNKVTIWDLAEGEEQDSLDTSSEIRCLEVAEQRKLLFTGLVSGVVLVFPLNSRQDVICIPPPEARKAINCMSLSKCEDRLAIAYDNIVLVLDITSGDPCPVIDGPRYTFYTQLPETLSSVAILTDYRVVYSMTNGDLFLYECATSKAFPLETHRSRVACVEVSHKEQLVVSGSEDALLCLWDLQARKWKFEMSYTAPC

SEQ ID NO: 611 - protein, 1710 aa, Homo sapiens
MSLDFGSVALPVQNEDEEYDEEDYEREKELQQLLTDLPHDMLDDDLSSPELQYSDCSEDGTDGQPHHPEQLEMSWNEQMLPKSQSVNGYNEIQSLYAGEKCGNVWEENRSKTEDRHPVYHPEEGGDEGGSGYSPPSKCEQTDLYHLPENFRPYTNGQKQEFNNQATNVIKFSDPQWNHFQGPSCQGLEPYNKVTYKPYQSSAQNNGSPAQEITGSDTFEGLQQQFLGANENSAENMQIIQLQVLNKAKERQLENLIEKLNESERQIRYLNHQLVIIKDEKDGLTLSLRESQKLFQNGKEREIQLEAQIKALETQIQALKVNEEQMIKKSRTTEMALESLKQQLVDLHHSESLQRAREQHESIVMGLTKKYEEQVLSLQKNLDATVTALKEQEDICSRLKDHVKQLERNQEAIKLEKTEIINKLTRSLEESQKQCAHLLQSGSVQEVAQLQFQLQQAQKAHAMSANMNKALQEELTELKDEISLYESAAKLGIHPSDSEGELNIELTESYVDLGIKKVNWKKSKVTSIVQEEDPNEELSKDEFILKLKAEVQRLLGSNSMKRHLVSQLQNDLKDCHKKIEDLHQVKKDEKSIEVETKTDTSEKPKNQLWPESSTSDVVRDDILLLKNEIQVLQQQNQELKETEGKLRNTNQDLCNQMRQMVQDFDHDKQEAVDRCERTYQQHHEAMKTQIRESLLAKHALEKQQLFEAYERTHLQLRSELDKLNKEVTAVQECYLEVCREKDNLELTLRKTTEKEQQTQEKIKEKLIQQLEKEWQSKLDQTIKAMKKKTLDCGSQTDQVTTSDVISKKEMAIMIEEQKCTIQQNLEQEKDIAIKGAMKKLEIELELKHCENITKQVEIAVQNAHQRWLGELPELAEYQALVKAEQKKWEEQHEVSVNKRISFAVSEAKEKWKSELENMRKNILPGKELEEKIHSLQKELELKNEEVPVVIRAELAKARSEWNKEKQEEIHRIQEQNEQDYRQFLDDHRNKINEVLAAAKEDFMKQKTELLLQKETELQTCLDQSRREWTMQEAKRIQLEIYQYEEDILTVLGVLLSDTQKEHISDSEDKQLLEIMSTCSSKWMSVQYFEKLKGCIQKAFQDTLPLLVENADPEWKKRNMAELSKDSASQGTGQGDPGPAAGHHAQPLALQATEAEADKKKVLEIKDLCCGHCFQELEKAKQECQDLKGKLEKCCRHLQHLERKHKAVVEKIGEENNKVVEELIEENNDMKNKLEELQTLCKTPPRSLSAGAIENACLPCSGGALEELRGQYIKAVKKIKCDMLRYIQESKERAAEMVKAEVLRERQETARKMRKYYLICLQQILQDDGKEGAEKKIMNAASKLATMAKLLETPISSKSQSKTTQSALPLTSEMLIAVKKSKRNDVNQKIPCCIESKSNSVNTITRTLCEQAPKRRAACNLQRLLENSEHQSIKHVGSKETHLEFQFGDGSCKHLNSLPRNVSPEFVPCEGEGGFGLHKKKDLLSDNGSESLPHSAAYPFLGTLGNKPSPRCTPGPSESGCMHITFRDSNERLGLKVYKCNPLMESENAASEKSQGLDVQEPPVKDGGDLSDCLGWPSSSATLSFDSREASFVHGRPQGTLEIPSESVKSKQFSPSGYLSDTEESNMICQTMKCQRYQTPYLSEETTYLEPGKISVNCGHPSRHKADRLKSDFKKLSSTLPSSVCQQPSRKLIVPLSSQQDSGFDSPFVNLD

SEQ ID NO: 612 - protein, 1198 aa, Homo sapiens
MDEETRHSLECIQANQIFPRKQLIREDENLQVPFLELHGESTEFVGRAEDAIIALSNYRLHIKFKESLVNVPLQLIESVECRDIFQLHLTCKDCKVIRCQFSTFEQCQEWLKRLNNAIRPPAKIEDLFSFAYHAWCMEVYASEKEQHGDLCRPGEHVTSRFKNEVERMGFDMNNAWRISNINEKYKLCGSYPQELIVPAWITDKELESVSSFRSWKRIPAVIYRHQSNGAVIARCGQPEVSWWGWRNADDEHLVQSVAKACASDSRSSGSKLSTRNTSRDFPNGGDLSDVEFDSSLSNASGAESLAIQPQKLLILDARSYAAAVANRAKGGGCECPEYYPNCEVVFMGMANIHSIRRSFQSLRLLCTQMPDPGNWLSALESTKWLHHLSVLLKSALLVVHAVDQDQRPVLVHCSDGWDRTPQIVALAKLLLDPYYRTIEGFQVLVEMEWLDFGHKFADRCGHGENSDDLNERCPVFLQWLDCVHQLQRQFPCSFEFNEAFLVKLVQHTYSCLFGTFLCNNAKERGEKHTQERTCSVWSLLRAGNKAFKNLLYSSQSEAVLYPVCHVRNLMLWSAVYLPCPSPTTPVDDSCAPYPAPGTSPDDPPLSRLPKTRSYDNLTTACDNTVPLASRRCSDPSLNEKWQEHRRSLELSSLAGPGEDPLSADSLGKPTRVPGGAELSVAAGVAEGQMENILQEATKEESGVEEPAHRAGIEIQEGKEDPLLEKESRRKTPEASAIGLHQDPELGDAALRSHLDMSWPLFSQGISEQQSGLSVLLSSLQVPPRGEDSLEVPVEQFRIEEIAEGREEAVLPIPVDAKVGYGTSQSCSLLPSQVPFETRGPNVDSSTDMLVEDKVKSVSGPQGHHRSCLVNSGKDRLPQTMEPSPSETSLVERPQVGSVVHRTSLGSTLSLTRSPCALPLAECKEGLVCNGAPETENRASEQPPGLSTLQMYPTPNGHCANGEAGRSKDSLSRQLSAMSCSSAHLHSRNLHHKWLHSHSGRPSATSSPDQPSRSHLDDDGMSVYTDTIQQRLRQIESGHQQEVETLKKQVQELKSRLESQYLTSSLHFNGDFGDEVTSIPDSESNLDQNCLSRCSTEIFSEASWEQVDKQDTEMTRWLPDHLAAHCYACDSAFWLASRKHHCRNCGNVFCSSCCNQKVPVPSQQLFEPSRVCKSCYSSLHPTSSSIDLELDKPIAATSN

SEQ ID NO: 613 - protein, 2778 aa, Homo sapiens
MALGKVLAMALVLALAVLGSLSPGARAGDCKGQRQVLREAPGFVTDGAGNYSVNGNCEWLIEAPSPQHRILLDFLFLDTECTYDYLFVYDGDSPRGPLLASLSGSTRPPPIEASSGKMLLHLFSDANYNLLGFNASFRFSLCPGGCQSHGQCQPPGVCACEPGWGGPDCGLQECSAYCGSHGTCASPLGPCRCEPGFLGRACDLHLWENQGAGWWHNVSARDPAFSARIGAAGAFLSPPGLLAVFGGQDLNNALGDLVLYNFSANTWESWDLSPAPAARHSHVAVAWAGSLVLMGGELADGSLTNDVWAFSPLGRGHWELLAPPASSSSGPPGLAGHAAALVDDVWLYVSGGRTPHDLFSSGLFRFRLDSTSGGYWEQVIPAGGRPPAATGHSMVFHAPSRALLVHGGHRPSTARFSVRVNSTELFHVDRHVWTTLKGRDGLQGPRERAFHTASVLGNYMVVYGGNVHTHYQEEKCYEDGIFFYHLGCHQWVSGAELAPPGTPEGRAAPPSGRYSHVAAVLGGSVLLVAGGYSGRPRGDLMAYKVPPFVFQAPAPDYHLDYCSMYTDHSVCSRDPECSWCQGACQAAPPPGTPLGACPAASCLGLGRLLGDCQACLAFSSPTAPPRGPGTLGWCVHNESCLPRPEQARCRGEQISGTVGWWGPAPVFVTSLEACVTQSFLPGLHLLTFQQPPNTSQPDKEEVGRWVAHQEKETRRLQRPGSARLFPLPGRDHKYAVEIQGQLNGSAGPGHSELTLLWDRTGVPGGSEISFFFLEPYRSSSCTSYSSCLGCLADQGCGWCLTSATCHLRQGGAHCGDDGAGGSLLVLVPTLCPLCEEHRDCHACTQDPFCEWHQSTSRKGDAACSRRGRGRGALKSPEECPPLCSQRLTCEDCLANSSQCAWCQSTHTCFLFAAYLARYPHGGCRGWDDSVHSEPRCRSCDGFLTCHECLQSHECGWCGNEDNPTLGRCLQGDFSGPLGGGNCSLWVGEGLGLPVALPARWAYARCPDVDECRLGLARCHPRATCLNTPLSYECHCQRGYQGDGISHCNRTCLEDCGHGVCSGPPDFTCVCDLGWTSDLPPPTPAPGPPAPRCSRDCGCSFHSHCRKRGPGFCDECQDWTWGEHCERCRPGSFGNATGSRGCRPCQCNGHGDPRRGHCDNLSGLCFCQDHTEGAHCQLCSPGYYGDPRAGGSCFRECGGRALLTNVSSVALGSRRVGGLLPPGGGAARAGPGLSYCVWVVSATEELQPCAPGTLCPPLTLTFSPDSSTPCTLSYVLAFDGFPRFLDTGVVQSDRSLIAAFCGQRRDRPLTVQALSGLLVLHWEANGSSSWGFNASVGSARCGSGGPGSCPVPQECVPQDGAAGAGLCRCPQGWAGPHCRMALCPENCNAHTGAGTCNQSLGVCICAEGFGGPDCATKLDGGQLVWETLMDSRLSADTASRFLHRLGHTMVDGPDATLWMFGGLGLPQGLLGNLYRYSVSERRWTQMLAGAEDGGPGPSPRSFHAAAYVPAGRGAMYLLGGLTAGGVTRDFWVLNLTTLQWRQEKAPQTVELPAVAGHTLTARRGLSLLLVGGYSPENGFNQQLLEYQLATGTWVSGAQSGTPPTGLYGHSAVYHEATDSLYVFGGFRFHVELAAPSPELYSLHCPDRTWSLLAPSQGAKRDRMRNVRGSSRGLGQVPGEQPGSWGFREVRKKMALWAALAGTGGFLEEISPHLKEPRPRLFHASALLGDTMVVLGGRSDPDEFSSDVLLYQVNCNAWLLPDLTRSASVGPPMEESVAHAVAAVGSRLYISGGFGGVALGRLLALTLPPDPCRLLSSPEACNQSGACTWCHGACLSGDQAHRLGCGGSPCSPMPRSPEECRRLRTCSECLARHPRTLQPGDGEASTPRCKWCTNCPEGACIGRNGSCTSENDCRINQREVFWAGNCSEAACGAADCEQCTREGKCMWTRQFKRTGETRRILSVQPTYDWTCFSHSLLNVSPMPVESSPPLPCPTPCHLLPNCTSCLDSKGADGGWQHCVWSSSLQQCLSPSYLPLRCMAGGCGRLLRGPESCSLGCAQATQCALCLRRPHCGWCAWGGQDGGGRCMEGGLSGPRDGLTCGRPGASWAFLSCPPEDECANGHHDCNETQNCHDQPHGYECSCKTGYTMDNMTGLCRPVCAQGCVNGSCVEPDHCRCHFGFVGRNCSTECRCNRHSECAGVGARDHCLLCRNHTKGSHCEQCLPLFVGSAVGGGTCRPCHAFCRGNSHICISRKELQMSKGEPKKYSLDPEEIENWVTEGPSEDEAVCVNCQNNSYGEKCESCLQGYFLLDGKCTKCQCNGHADTCNEQDGTGCPCQNNTETGTCQGSSPSDRRDCYKYQCAKCRESFHGSPLGGQQCYRLISVEQECCLDPTSQTNCFHEPKRRALGPGRTVLFGVQPKFTNVDIRLTLDVTFGAVDLYVSTSYDTFVVRVAPDTGVHTVHIQPPPAPPPPPPPADGGPRGAGDPGGAGASSGPGAPAEPRVREVWPRGLITYVTVTEPSAVLVVRGVRDRLVITYPHEHHALKSSRFYLLLLGVGDPSGPGANGSADSQGLLFFRQDQAHIDLFVFFSVFFSCFFLFLSLCVLLWKAKQALDQRQEQRRHLQEMTKMASRPFAKVTVCFPPDPTAPASAWKPAGLPPPAFRRSEPFLAPLLLTGAGGPWGPMGGGCCPPAIPATTAGLRAGPITLEPTEDGMAGVATLLLQLPGGPHAPNGACLGSALVTLRHRLHEYCGGGGGAGGSGHGTGAGRKGLLSQDNLTSMSL

SEQ ID NO: 614 - protein, 2601 aa, Homo sapiens
MKRKVVNTHKLRLSPNEEAFILKEDYERRRKLRLLQVREQERDIALQIREDIKQRRNQQFTRLAEELRAEWEESQTQKIQNLEKLYLASLRSMGEGHRQAKENEPDLDALAQRAAERKRKADLRHKEALKVQKNQKEILLKQKTWHIKARKEALLVEKERSAKITSLPPPPPTLFENIEVKRISAVKTNSSTYHHLHTFVNRETDTKRPDARLAAEEEAKRLEELQKQAAQERMERFEKAHVRGFQAMKKIHLAQNQEKLMKELKQLQQEDLARRRQTVAQMPPQLVELPYKRSEMKEDWQRELEFAFEDMYNADRKVKGNLILHLEPEPLPTVTNQIQDEELDLSMEQENLGAAEDLPVTEAEICSSETDVPLVMKTQQIPSKVLFKKLLNKIRSQKSLWTIKSMSEDESEMITTVSEIESKAPTVESGTIASKERTLSSGQEQVVESDTLTIESGPLASEDKPLSCGTNSGKEQEINETLPITTVAQSSVLLHPQEAAARIRMSARQKQIMEIEEQKQKQLELLEQIEQQKLRLETDCFRAQLEEEKRKKTQPTGVGIAPASCPVISDEDSHRQMIRNYQHQLLQQNRLHRQSVETARKQLLEYQTMLKGRCPSVSAPSLITDSVISVPSWKSERPTAISEHWDQGQRLKLSPNKYQPIQPIQTSKLEQDHFQVARQNHFPQRQVETTETLRASDILTNQALESQEHLRQFSQTETQQRDYKLVPKDSETLSRALSHDRQLISQDARKISETFGATTFQSLESQQLFSENSENISYHLTEPSSFVPLVPQHSFSSLPVKVESGKIQEPFSAMSKSTVSTSHSIISQMHDRPLLPSENITAQQGNMKALQEQLDLQKKVLQATQEAQEQLLLCKQKEVEQQTGLSVFLPLVTPDSSALLPSAKADLGRIQESSPTKNNIAVSSDHHVISQLQDKRLSLSQPILSQQNNFKFLQEQLNIQKDSLQARREAQEVLYVHKQSELDRRVCSEQAEPSFPFQVAQHTFTSLPSADTKSGKIQEQHSSKSEKGLVSCQSDIPISQDGSLSFLQQFLPLHDSLKLLQEQLTKQRDTLQARHEAQVELLLHRQRDLGDSKSGLVSSSSSPVVVQHSVASQASAKAEPRRIQELYLSEKENVGPSCHLIIPTFQDKSLSFPQHSLAQQENLTILQEQSQIQRVILGAKEGTQEFVHTESELEKRISSEQTGTSSSLSQVDESERFQECISIKSDSTIPLSHPKIPRCQERLLRVSQHMLPLQDNLEEHQAWLDTEKEAFHFSQKTQENTSSEQTGSSSFIPQLVQLSFTSLASAESGTILEPLFTESESKIFSSHLQIPQLQDRLLRISQLIQPQQDNLKALQEQLATQREAIILARQEAREELLLHQSEWEGRISPEQVDTSSLPLVPQHSFASLPLNESERNQEPCSINSDNIVSSGHSEIPTLPDGLLGLSHLVLPQQDNLIALEEHLHAQTDFLPSIEKTQKELVLSKPCKFEEKVSSEHFIQSHHGDLQALQQQLDTQKKAIRSIQEVQEELLLQRLSELEKRVSSEQVCSSSFVSQVPVADSERTQKSFPTKSNDTLPSSHREIPRLQDRLLSLSKPILPQQDNMTAQLDAQREVMYSYEKPQEELSLNKQRKLNKSESAEHTIPSLFLPKETEHSFIPLPFAEAKPKSTCELYSSQNEHAAPPSNPVIPGFQDRLLSFSQSVLTQQDNLGLQKQLDLQREVLHYSQKAQEKLLVQRQTALQQQIQKHEETLKDFFKDSQISKPTVENDLKTQKMGQLRDWFPNTQDLAGNDQENIRHADRNNSDDNHLASEDTSAKQSGEHLEKDLGRRSSKPPVAKVKCGLDLNQHELSAIQEVESPAIGRTSILGKPGIYEDRDPLRVSISREQSFFGSPLAHDPFSCLQLVGQENVCGDDYDEAVKLKESVVENHAVLSYAVEEEHAYLGPTVKPDDKAKTLSYEPLSSATVSTGSLLSYENTDLSLTDPESFSEHMDDSKQESTTSKEEETNIISSIVPSTQDIYQRQNSSDVHKSLLPAVDETTCGHTHFQQMIDKYINEANLIPEKTDLQELEHIFPNLHHQLFKPLEPHPDFDLSSSSSGISPDNRDFYQRSDSSSESHCATGLSKSTVYFTALRRTSMHSSLNTSPNQQPDTNLAHVGAHSFATENIIGGSEQCFEQLQPEYSSQEESQHADLPSIFSIEARDSSQGMKNQNYPSEEHTEILQNKKKIVHFQLSIGNLSSVYSSSDEANVFDQLNVQHSTPCGSNSSECSTKHQLESRKESMGFEELSKRGVVTMLQSQGLIEDNKNETCRVLDINPQVEETDSRLCVRTVEMGTSIQAPYSLTTQNEKYFENSAETDIPKITKKLSQLGESELFASSGSFSLQSSIPVWETETGHGIMEEPELTLISTTDTSIAEMDFANLTLEEKSENEAKCFFQVSEFLPLVSATEASDYPAVSELSIEKPRTASTETPRRLTPVPGSLQEAFIKRKKSFMERSHQRQKEIRNKIHVSENSQIKTVKEKPSISSSVSRLKGVNKVRASFPEDRKTTQALRHQRGLRLYNQLAEVKQQKEEKTKQEAYAQNRARAKEFHKKTLEKLRAKNTC

SEQ ID NO: 615 - protein, 1918 aa, Homo sapiens
MEERRPHLDARPRNSHTNHRGPVDGELPPRARNQANNPPANALRGGASHPGRHPRANNHPAAYWQREERFRAMGRNPHQGRRNQEGHASDEARDQRHDQENDTRWRNGNQDCRNRRPPWSNDNFQQWRTPHQKPTEQPQQAKKLGYKFLESLLQKDPSEVVITLATSLGLKELLSHSSMKSNFLELICQVLRKACSSKMDRQSVLHVLGILKNSKFLKVCLPAYVVGMITEPIPDIRNQYPEHISNIISLLQDLVSVFPASSVQETSMLVSLLPTSLNALRASGVDIEEETEKNLEKVQTIIEHLQEKRREGTLRVDTYTLVQPEAEDHVESYRTMPIYPTYNEVHLDERPFLRPNIISGKYDSTAIYLDTHFRLLREDFVRPLREGILELLQSFEDQGLRKRKFDDIRIYFDTRIITPMCSSSGIVYKVQFDTKPLKFVRWQNSKRLLYGSLVCMSKDNFETFLFATVSNREQEDLCRGIVQLCFNEQSQQLLAEVQPSDSFLMVETTAYFEAYRHVLEGLQEVQEEDVPFQRNIVECNSHVKEPRYLLMGGRYDFTPLIENPSATGEFLRNVEGLRHPRINVLDPGQWPSKEALKLDDSQMEALQFALTRELAIIQGPPGTGKTYVGLKIVQALLTNESVWQISLQKFPILVVCYTNHALDQFLEGIYNCQKTSIVRVGGRSNSEILKQFTLRELRNKREFRRNLPMHLRRAYMSIMTQMKESEQELHEGAKTLECTMRGVLREQYLQKYISPQHWESLMNGPVQDSEWICFQHWKHSMMLEWLGLGVGSFTQSVSPAGPENTAQAEGDEEEEGEEESSLIEIAEEADLIQADRVIEEEEVVRPQRRKKEESGADQELAKMLLAMRLDHCGTGTAAGQEQATGEWQTQRNQKKKMKKRVKDELRKLNTMTAAEANEIEDVWQLDLSSRWQLYRLWLQLYQADTRRKILSYERQYRTSAERMAELRLQEDLHILKDAQVVGMTTTGAAKYRQILQKVEPRIVIVEEAAEVLEAHTIATLSKACQHLILIGDHQQLRPSANVYDLAKNFNLEVSLFERLVKVNIPFVRLNYQHRMCPEIARLLTPHIYQDLENHPSVLKYEKIKGVSSNLFFVEHNFPEQEIQEGKSHQNQHEAHFVVELCKYFLCQEYLPSQITILTTYTGQLFCLRKLMPAKTFAGVRVHVVDKYQGEENDIILLSLVRSNQEGKVGFLQISNRICVALSRAKKGMYCIGNMQMLAKVPLWSKIIHTLRENNQIGPMLRLCCQNHPETHTLVSKASDFQKVPEGGCSLPCEFRLGCGHVCTRACHPYDSSHKEFQCMKPCQKVICQEGHRCPLVCFQECQPCQVKVPKTIPRCGHEQMVPCSVPESDFCCQEPCSKSLRCGHRCSHPCGEDCVQLCSEMVTIKLKCGHSQPVKCGHVEGLLYGGLLVKCTTKCGTILDCGHPCPGSCHSCFEGRFHERCQQPCKRLLICSHKCQEPCIGECPPCQRTCQNRCVHSQCKKKCGELCSPCVEPCVWRCQHYQCTKLCSEPCNRPPCYVPCTKLLVCGHPCIGLCGEPCPKKCRICHMDEVTQIFFGFEDEPDARFVQLEDCSHIFEVQALDRYMNEQKDDEVAIRLKVCPICQVPIRKNLRYGTSIKQRLEEIEIIKEKIQGSAGEIATSQERLKALLERKSLLHQLLPEDFLMLKEKLAQKNLSVKDLGLVENYISFYDHLASLWDSLKKMHVLEEKRVRTRLEQVHEWLAKKRLSFTSQELSDLRSEIQRLTYLVNLLTRYKIAEKKVKDSIAVEVYSVQNILEKTCKFTQEDEQLVQEKMEALKATLPCSGLGISEEERVQIVSAIGYPRGHWFKCRNGHIYVIGDCGGAMERGTCPDCKEVIGGTNHTLERSNQLASEMDGAQHAAWSDTANNLMNFEEIQGMM

SEQ ID NO: 616 - protein, 1770 aa, Homo sapiens
MPRRRKNLGGNPFRKTANPKEVVVSSVASREEPTTTLPSMGETKVDQEELFTSISEIFSDLDPDVVYLMLSECDFKVENAMDCLLELSATDTKIEESSSQSFVASENQVGAAESKIMEKRPEEESEDSKMDSFLDMQLTEDLDSLIQNAFEKLNSSPDDQVYSFLPSQDVNSFNDSSEFINPDSSNMTPIFSTQNMNLNGENLENSGSTLSLNPLPSHSVLNESKCFIKDNTLALESNYPEDSLLSSSLNVASDSIAGCSSLNQKQKELLESECVEAQFSEAPVDLDASEPQACLNLPGLDLPGTGGDQKSTRVSDVFLPSEGFNFKPHKHPELPTKGKDVSYCPVLAPLPLLLPPPPPPPMWNPMIPAFDLFQGNHGFVAPVVTTAAHWRSVNYTFPPSVISHTSPTKVWRNKDGTSAYQVQETPVSQVVRKKTSYVGLVLVLLRGLPGSGKSFLARTLQEDNPSGVILSTDDYFYINGQYQFDVKYLGEAHEWNQNRAKEAFEKKISPIIIDNTNLQAWEMKPYVALSQKHKYKVLFREPDTWWKFKPKELARRNIHGVSKEKITRMLEHYQRFVSVPIIMSSSVPEKIERIELCAYSCEDRSTSPRDDEDIISEKEENILSLSLKHLEFTEEKNLDVTKETMLPENVAYLSNADLNKRRKEISDMNPSIQSALILETPHMYFSDSESKLQATDKSENEQIEMVAVKGYSKTDTDSSMERVSPSTCCSENNQEDCDLANSGPLQNEKSSPGEIVEERATVTKKAFGKQKSKSTLEKFPRHELSNFVGDWPVDKTIGQRTKRNRKTEKTSSVQSDKKYNYPQSHKLVNSVSVNTDCVQQRGSPHESVEDGRKSQCDDASEPLNSYKYDAYKNIDKNSFNIMGDWPSSDSLAQREHRSRMPKTGLSEPNLEIGTNDKMNEISLSTAHEACWGTSSQKLKTLGSSNLGSSEMLLSEMTCESQTCLSKKSHGQHTSLPLTFTNSAPTVSGVVEPQTLAECQEQMPKRDPGKEVGMCTQTEPQDFALLWKIEKNKISISDSIKVLTGRLDGFKPKVFNINTKSDVQEAIPYRVMYDKSTFVEESELTSADESENLNILCKLFGSFSLEALKDLYERCNKDIIWATSLLLDSETKLCEDTEFENFQKSCDGSQIGPFSLGLNLKEIISQRGTLENSNSPVPEFSHGIGISNADSQSTCDAERGNSEQAEMRAVTPENHESMTSIFPSAAVGLKNNNDILPNSQEELLYSSKQSFPGILKATTPKDMSETEKNLVVTETGDNIHSPSHFSDIFNFVSSTSNLELNEEIYFTDSLEIKRNENFPKDYVKFSDEEEFMNEDEKEMKEILMAGSSLSAGVSGEDKTEILNPTPAMAKSLTIDCLELALPPELAFQLNELFGPVGIDSGSLTVEDCVVHIDLNLAKVIHEKWKESVMERQRQEEVSCGKFMQDPSLVGHTGLDNPEQKSSQRTGKKLLKTLTASEMLPLLDHWNTQTKKVSLREIMSEEIALQEKHNLKRETLMFEKDCATKLKEKQLFKIFPAINQNFLVDIFKDHNYSLEHTVQFLNCVLEGDPVKTVVAQEFVHQNENVTSHTGQKSKEKKPKKLKETEETPSELSFQDFEYPDYDDYRAEAFLHQQKRMECYSKAKEAYRIGKKNVATFYAQQGTLHEQKMKEANHLAAIEIFEKVNASLLPQNVLDLHGLHVDEALEHLMRVLEKKTEEFKQNGGKPYLSVITGRGNHSQGGVARIKPAVIKYLISHSFRFSEIKPGCLKVMLK

SEQ ID NO: 617 - protein, 411 aa, Homo sapiens
MWSGWWLWPLVAVCTADFFRDEAERIMRDSPVIDGHNDLPWQLLDMFNNRLQDERANLTTLAGTHTNIPKLRAGFVGGQFWSVYTPCDTQNKDAVRRTLEQMDVVHRMCRMYPETFLYVTSSAGIRQAFREGKVASLIGVEGGHSIDSSLGVLRALYQLGMRYLTLTHSCNTPWADNWLVDTGDSEPQSQGLSPFGQRVVKELNRLGVLIDLAHVSVATMKATLQLSRAPVIFSHSSAYSVCASRRNVPDDVLRLVKQTDSLVMVNFYNNYISCTNKANLSQVADHLDHIKEVAGARAVGFGGDFDGVPRVPEGLEDVSKYPDLIAELLRRNWTEAEVKGALADNLLRVFEAVEQASNLTQAPEEEPIPLDQLGGSCRTHYGYSSGASSLHRHWGLLLASLAPLVLCLSLL

SEQ ID NO: 618 - protein, 1954 aa, Homo sapiens
MRGPVGTEEELPRLFAEEMENEDEMSEEEDGGLEAFDDFFPVEPVSLPKKKKPKKLKENKCKGKRKKKEGSNDELSENEEDLEEKSESEGSDYSPNKKKKKKLKDKKEKKAKRKKKDEDEDDNDDGCLKEPKSSGQLMAEWGLDDVDYLFSEEDYHTLTNYKAFSQFLRPLIAKKNPKIPMSKMMTVLGAKWREFSANNPFKGSSAAAAAAAVAAAVETVTISPPLAVSPPQVPQPVPIRKAKTKEGKGPGVRKKIKGSKDGKKKGKGKKTAGLKFRFGGISNKRKKGSSSEEDEREESDFDSASIHSASVRSECSAALGKKSKRRRKKKRIDDGDGYETDHQDYCEVCQQGGEIILCDTCPRAYHLVCLDPELEKAPEGKWSCPHCEKEGIQWEPKDDDDEEEEGGCEEEEDDHMEFCRVCKDGGELLCCDACPSSYHLHCLNPPLPEIPNGEWLCPRCTCPPLKGKVQRILHWRWTEPPAPFMVGLPGPDVEPSLPPPKPLEGIPEREFFVKWAGLSYWHCSWVKELQLELYHTVMYRNYQRKNDMDEPPPFDYGSGDEDGKSEKRKNKDPLYAKMEERFYRYGIKPEWMMIHRILNHSFDKKGDVHYLIKWKDLPYDQCTWEIDDIDIPYYDNLKQAYWGHRELMLGEDTRLPKRLLKKGKKLRDDKQEKPPDTPIVDPTVKFDKQPWYIDSTGGTLHPYQLEGLNWLRFSWAQGTDTILADEMGLGKTVQTIVFLYSLYKEGHSKGPYLVSAPLSTIINWEREFEMWAPDFYVVTYTGDKESRSVIRENEFSFEDNAIRSGKKVFRMKKEVQIKFHVLLTSYELITIDQAILGSIEWACLVVDEAHRLKNNQSKFFRVLNSYKIDYKLLLTGTPLQNNLEELFHLLNFLTPERFNNLEGFLEEFADISKEDQIKKLHDLLGPHMLRRLKADVFKNMPAKTELIVRVELSQMQKKYYKFILTRNFEALNSKGGGNQVSLLNIMMDLKKCCNHPYLFPVAAVEAPVLPNGSYDGSSLVKSSGKLMLLQKMLKKLRDEGHRVLIFSQMTKMLDLLEDFLEYEGYKYERIDGGITGGLRQEAIDRFNAPGAQQFCFLLSTRAGGLGINLATADTVIIYDSDWNPHNDIQAFSRAHRIGQNKKVMIYRFVTRASVEERITQVAKRKMMLTHLVVRPGLGSKSGSMTKQELDDILKFGTEELFKDDVEGMMSQGQRPVTPIPDVQSSKGGNLAASAKKKHGSTPPGDNKDVEDSSVIHYDDAAISKLLDRNQDATDDTELQNMNEYLSSFKVAQYVVREEDGVEEVEREIIKQEENVDPDYWEKLLRHHYEQQQEDLARNLGKGKRIRKQVNYNDASQEDQEWQDELSDNQSEYSIGSEDEDEDFEERPEGQSGRRQSRRQLKSDRDKPLPPLLARVGGNIEVLGFNARQRKAFLNAIMRWGMPPQDAFNSHWLVRDLRGKSEKEFRAYVSLFMRHLCEPGADGAETFADGVPREGLSRQHVLTRIGVMSLVRKKVQEFEHVNGKYSTPDLIPEGPEGKKSGEVISSDPNTPVPASPAHLLPAPLGLPDKMEAQLGYMDEKDPGAQKPRQPLEVQALPAALDRVESEDKHESPASKERAREERPEETEKAPPSPEQLPREEVLPEKEKILDKLELSLIHSRGDSSELRPDDTKAEEKEPIETQQNGDKEEDDEGKKEDKKGKFKFMFNIADGGFTELHTLWQNEERAAVSSGKIYDIWHRRHDYWLLAGIVTHGYARWQDIQNDPRYMILNEPFKSEVHKGNYLEMKNKFLARRFKLLEQALVIEEQLRRAAYLNMTQDPNHPAMALNARLAEVECLAESHQHLSKESLAGNKPANAVLHKVLNQLEELLSDMKADVTRLPSMLSRIPPVAARLQMSERSILSRLTNRAGDPTIQQGAFGSSQMYSNNFGPNFRGPGPGGIVNYNQMPLGPYVTDI

SEQ ID NO: 619 - protein, 1208 aa, Homo sapiens
MDLHMMNCELLATCSALGYLEGDTYHKEPDCLESVKDLIRYLRHEDETRDVRQQLGAAQILQSDLLPILTQHHQDKPLFDAVIRLMVNLTQPALLCFGNLPKEPSFRHHFLQVLTYLQAYKEAFASEKAFGVLSETLYELLQLGWEERQEEDNLLIERILLLVRNILHVPADLDQEKKIDDDASAHDQLLWAIHLSGLDDLLLFLASSSAEEQWSLHVLEIVSLMFRDQNPEQLAGVGQGRLAQERSADFAELEVLRQREMAEKKTRALQRGNRHSRFGGSYIVQGLKSIGERDLIFHKGLHNLRNYSSDLGKQPKKVPKRRQAARELSIQRRSALNVRLFLRDFCSEFLENCYNRLMGSVKDHLLREKAQQHDETYYMWALAFFMAFNRAASFRPGLVSETLSVRTFHFIEQNLTNYYEMMLTDRKEAASWARRMHLALKAYQELLATVNEMDISPDEAVRESSRIIKNNIFYVMEYRELFLALFRKFDERCQPRSFLRDLVETTHLFLKMLERFCRSRGNLVVQNKQKKRRKKKKKVLDQAIVSGNVPSSPEEVEAVWPALAEQLQCCAQNSELSMDSVVPFDAASEVPVEEQRAEAMVRIQDCLLAGQAPQALTLLRSAREVWPEGDVFGSQDISPEEEIQLLKQILSAPLPRQQGPEERGAEEEEEEEEEEEEELQVVQVSEKEFNFLDYLKRFACSTVVRAYVLLLRSYQQNSAHTNHCIVKMLHRLAHDLKMEALLFQLSVFCLFNRLLSDPAAGAYKELVTFAKYILGKFFALAAVNQKAFVELLFWKNTAVVREMTEGYGSLDDRSSSRRAPTWSPEEEAHLRELYLANKDVEGQDVVEAILAHLNTVPRTRKQIIHHLVQMGLADSVKDFQRKGTHIVLWTGDQELELQRLFEEFRDSDDVLGHIMKNITAKRSRARIVDKLLALGLVAERRELYKKRQKKLASSILPNGAESLKDFCQEDLEEEENLPEEDSEEEEEGGSEAEQVQGSLVLSNENLGQSLHQEGFSIPLLWLQNCLIRAADDREEDGCSQAVPLVPLTEENEEAMENEQFQQLLRKLGVRPPASGQETFWRIPAKLSPTQLRRAAASLSQPEEEQKLQPELQPKVPGEQGSDEEHCKEHRAQALRALLLAHKKKAGLASPEEEDAVGKEPLKAAPKKRQLLDSDEEQEEDEGRNRAPELGAPGIQKKKRYQIEDDEDD

SEQ ID NO: 620 - protein, 2527 aa, Homo sapiens
MASGSCQGCEEDEETLKKLIVRLNNVQEGKQIETLVQILEDLLVFTYSEHASKLFQGKNIHVPLLIVLDSYMRVASVQQVGWSLLCKLIEVCPGTMQSLMGPQDVGNDWEVLGVHQLILKMLTVHNASVNLSVIGLKTLDLLLTSGKITLLILDEESDIFMLIFDAMHSFPANDEVQKLGCKALHVLFERVSEEQLTEFVENKDYMILLSALTNFKDEEEIVLHVLHCLHSLAIPCNNVEVLMSGNVRCYNIVVEAMKAFPMSERIQEVSCCLLHRLTLGNFFNILVLNEVHEFVVKAVQQYPENAALQISALSCLALLTETIFLNQDLEEKNENQENDDEGEEDKLFWLEACYKALTWHRKNKHVQEAACWALNNLLMYQNSLHEKIGDEDGHFPAHREVMLSMLMHSSSKEVFQASANALSTLLEQNVNFRKILLSKGIHLNVLELMQKHIHSPEVAESGCKMLNHLFEGSNTSLDIMAAVVPKILTVMKRHETSLPVQLEALRAILHFIVPGMPEESREDTEFHHKLNMVKKQCFKNDIHKLVLAALNRFIGNPGIQKCGLKVISSIVHFPDALEMLSLEGAMDSVLHTLQMYPDDQEIQCLGLSLIGYLITKKNVFIGTGHLLAKILVSSLYRFKDVAEIQTKGFQTILAILKLSASFSKLLVHHSFDLVIFHQMSSNIMEQKDQQFLNLCCKCFAKVAMDDYLKNVMLERACDQNNSIMVECLLLLGADANQAKEGSSLICQVCEKESSPKLVELLLNSGSREQDVRKALTISIGKGDSQIISLLLRRLALDVANNSICLGGFCIGKVEPSWLGPLFPDKTSNLRKQTNIASTLARMVIRYQMKSAVEEGTASGSDGNFSEDVLSKFDEWTFIPDSSMDSVFAQSDDLDSEGSEGSFLVKKKSNSISVGEFYRDAVLQRCSPNLQRHSNSLGPIFDHEDLLKRKRKILSSDDSLRSSKLQSHMRHSDSISSLASEREYITSLDLSANELRDIDALSQKCCISVHLEHLEKLELHQNALTSFPQQLCETLKSLTHLDLHSNKFTSFPSYLLKMSCIANLDVSRNDIGPSVVLDPTVKCPTLKQFNLSYNQLSFVPENLTDVVEKLEQLILEGNKISGICSPLRLKELKILNLSKNHISSLSENFLEACPKVESFSARMNFLAAMPFLPPSMTILKLSQNKFSCIPEAILNLPHLRSLDMSSNDIQYLPGPAHWKSLNLRELLFSHNQISILDLSEKAYLWSRVEKLHLSHNKLKEIPPEIGCLENLTSLDVSYNLELRSFPNEMGKLSKIWDLPLDELHLNFDFKHIGCKAKDIIRFLQQRLKKAVPYNRMKLMIVGNTGSGKTTLLQQLMKTKKSDLGMQSATVGIDVKDWPIQIRDKRKRDLVLNVWDFAGREEFYSTHPHFMTQRALYLAVYDLSKGQAEVDAMKPWLFNIKARASSSPVILVGTHLDVSDEKQRKACMSKITKELLNKRGFPAIRDYHFVNATEESDALAKLRKTIINESLNFKIRDQLVVGQLIPDCYVELEKIILSERKNVPIEFPVIDRKRLLQLVRENQLQLDENELPHAVHFLNESGVLLHFQDPALQLSDLYFVEPKWLCKIMAQILTVKVEGCPKHPKGIISRRDVEKFLSKKRKFPKNYMSQYFKLLEKFQIALPIGEEYLLVPSSLSDHRPVIELPHCENSEIIIRLYEMPYFPMGFWSRLINRLLEISPYMLSGRERALRPNRMYWRQGIYLNWSPEAYCLVGSEVLDNHPESFLKITVPSCRKGCILLGQVVDHIDSLMEEWFPGLLEIDICGEGETLLKKWALYSFNDGEEHQKILLDDLMKKAEEGDLLVNPDQPRLTIPISQIAPDLILADLPRNIMLNNDELEFEQAPEFLLGDGSFGSVYRAAYEGEEVAVKIFNKHTSLRLLRQELVVLCHLHHPSLISLLAAGIRPRMLVMELASKGSLDRLLQQDKASLTRTLQHRIALHVADGLRYLHSAMIIYRDLKPHNVLLFTLYPNAAIIAKIADYGIAQYCCRMGIKTSEGTPGFRAPEVARGNVIYNQQADVYSFGLLLYDILTTGGRIVEGLKFPNEFDELEIQGKLPDPVKEYGCAPWPMVEKLIKQCLKENPQERPTSAQVFDILNSAELVCLTRRILLPKNVIVECMVATHHNSRNASIWLGCGHTDRGQLSFLDLNTEGYTSEEVADSRILCLALVHLPVEKESWIVSGTQSGTLLVINTEDGKKRHTLEKMTDSVTCLYCNSFSKQSKQKNFLLVGTADGKLAIFEDKTVKLKGAAPLKILNIGNVSTPLMCLSESTNSTERNVMWGGCGTKIFSFSNDFTIQKLIETRTSQLFSYAAFSDSNIITVVVDTALYIAKQNSPVVEVWDKKTEKLCGLIDCVHFLREVMVKENKESKHKMSYSGRVKTLCLQKNTALWIGTGGGHILLLDLSTRRLIRVIYNFCNSVRVMMTAQLGSLKNVMLVLGYNRKNTEGTQKQKEIQSCLTVWDINLPHEVQNLEKHIEVRKELAEKMRRTSVE

SEQ ID NO: 621 - protein, 983 aa, Homo sapiens
MDCQLSILLLLSCSVLDSFGELIPQPSNEVNLLDSKTIQGELGWISYPSHGWEEISGVDEHYTPIRTYQVCNVMDHSQNNWLRTNWVPRNSAQKIYVELKFTLRDCNSIPLVLGTCKETFNLYYMESDDDHGVKFREHQFTKIDTIAADESFTQMDLGDRILKLNTEIREVGPVNKKGFYLAFQDVGACVALVSVRVYFKKCPFTVKNLAMFPDTVPMDSQSLVEVRGSCVNNSKEEDPPRMYCSTEGEWLVPIGKCSCNAGYEERGFMCQACRPGFYKALDGNMKCAKCPPHSSTQEDGSMNCRCENNYFRADKDPPSMACTRPPSSPRNVISNINETSVILDWSWPLDTGGRKDVTFNIICKKCGWNIKQCEPCSPNVRFLPRQFGLTNTTVTVTDLLAHTNYTFEIDAVNGVSELSSPPRQFAAVSITTNQAAPSPVLTIKKDRTSRNSISLSWQEPEHPNGIILDYEVKYYEKQEQETSYTILRARGTNVTISSLKPDTIYVFQIRARTAAGYGTNSRKFEFETSPDSFSISGESSQVVMIAISAAVAIILLTVVIYVLIGRFCGYKSKHGADEKRLHFGNGHLKLPGLRTYVDPHTYEDPTQAVHEFAKELDATNISIDKVVGAGEFGEVCSGRLKLPSKKEISVAIKTLKVGYTEKQRRDFLGEASIMGQFDHPNIIRLEGVVTKSKPVMIVTEYMENGSLDSFLRKHDAQFTVIQLVGMLRGIASGMKYLSDMGYVHRDLAARNILINSNLVCKVSDFGLSRVLEDDPEAAYTTRGGKIPIRWTSPEAIAYRKFTSASDVWSYGIVLWEVMSYGERPYWEMSNQDVIKAVDEGYRLPPPMDCPAALYQLMLDCWQKDRNNRPKFEQIVSILDKLIRNPGSLKIITSAAARPSNLLLDQSNVDITTFRTTGDWLNGVWTAHCKEIFTGVEYSSCDTIAKISTDDMKKVGVTVVGPQKKIISSIKALETQSKNGPVPV

SEQ ID NO: 622 - protein, 1386 aa, Homo sapiens
MPEGAQGLSLSKPSPSLGCGRRGEVCDCGTVCETRTAPAAPTMASPRGSGSSTSLSTVGSEGDPAPGPTPACSASRPEPLPGPPIRLHLSPVGIPGSARPSRLERVAREIVETERAYVRDLRSIVEDYLGPLLDGGVLGLSVEQVGTLFANIEDIYEFSSELLEDLENSSSAGGIAECFVQRSEDFDIYTLYCMNYPSSLALLRELSLSPPAALWLQERQAQLRHSLPLQSFLLKPVQRILKYHLLLQELGKHWAEGPGTGGREMVEEAIVSMTAVAWYINDMKRKQEHAARLQEVQRRLGGWTGPELSAFGELVLEGAFRGGGGGGPRLRGGERLLFLFSRMLLVAKRRGLEYTYKGHIFCCNLSVSESPRDPLGFKVSDLTIPKHRHLLQAKNQEEKRLWIHCLQRLFFENHPASIPAKAKQVLLENSLHCAPKSKPVLEPLTPPLGSPRPRDARSFTPGRRNTAPSPGPSVIRRGRRQSEPVKDPYVMFPQNAKPGFKHAGSEGELYPPESQPPVSGSAPPEDLEDAGPPTLDPSGTSITEEILELLNQRGLRDPGPSTHDIPKFPGDSQVPGDSETLTFQALPSRDSSEEEEEEEEGLEMDERGPSPLHVLEGLESSIAAEMPSIPCLTKIPDVPNLPEIPSRCEIPEGSRLPSLSDISDVFEMPCLPAIPSVPNTPSLSSTPTLSCDSWLQGPLQEPAEAPATRRELFSGSNPGKLGEPPSGGKAGPEEDEEGVSFTDFQPQDVTQHQGFPDELAFRSCSEIRSAWQALEQGQLARPGFPEPLLILEDSDLGGDSGSGKAGAPSSERTASRVRELARLYSERIQQMQRAETRASANAPRRRPRVLAQPQPSPCLPQEQAEPGLLPAFGHVLVCELAFPLTCAQESVPLGPAVWVQAAIPLSKQGGSPDGQGLHVSNLPKQDLPGIHVSAATLLPEQGGSRHVQAPAATPLPKQEGPLHLQVPALTTFSDQGHPEIQVPATTPLPEHRSHMVIPAPSTAFCPEQGHCADIHVPTTPALPKEICSDFTVSVTTPVPKQEGHLDSESPTNIPLTKQGGSRDVQGPDPVCSQPIQPLSWHGSSLDPQGPGDTLPPLPCHLPDLQIPGTSPLPAHGSHLDHRIPANAPLSLSQELPDTQVPATTPLPLPQVLTDIWVQALPTSPKQGSLPDIQGPAAAPPLPEPSLTDTQVQKLTPSLEQKSLIDAHVPAATPLPERGGSLDIQGLSPTPVQTTMVLSKPGGSLASHVARLESSDLTPPHSPPPSSRQLLGPNAAALSRYLAASYISQSLARRQGPGGGAPAASRGSWSSAPTSRASSPPPQPQPPPPPARRLSYATTVNIHVGGGGRLRPAKAQVRLNHPALLASTQESMGLHRAQGAPDAPFHM

SEQ ID NO: 623 - protein, 187 aa, Homo sapiens
MPVDLSKWSGPLSLQEVDEQPQHPLHVTYAGAAVDELGKVLTPTQVKNRPTSISWDGLDSGKLYTLVLTDPDAPSRKDPKYREWHHFLVVNMKGNDISSGTVLSDYVGSGPPKGTGLHRYVWLVYEQDRPLKCDEPILSNRSGDHRGKFKVASFRKKYELRAPVAGTCYQAEWDDYVPKLYEQLSGK

SEQ ID NO: 624 - protein, 1780 aa, Homo sapiens
MESNFNQEGVPRPSYVFSADPIARPSEINFDGIKLDLSHEFSLVAPNTEANSFESKDYLQVCLRIRPFTQSEKELESEGCVHILDSQTVVLKEPQCILGRLSEKSSGQMAQKFSFSKVFGPATTQKEFFQGCIMQPVKDLLKGQSRLIFTYGLTNSGKTYTFQGTEENIGILPRTLNVLFDSLQERLYTKMNLKPHRSREYLRLSSEQEKEEIASKSALLRQIKEVTVHNDSDDTLYGSLTNSLNISEFEESIKDYEQANLNMANSIKFSVWVSFFEIYNEYIYDLFVPVSSKFQKRKMLRLSQDVKGYSFIKDLQWIQVSDSKEAYRLLKLGIKHQSVAFTKLNNASSRSHSIFTVKILQIEDSEMSRVIRVSELSLCDLAGSERTMKTQNEGERLRETGNINTSLLTLGKCINVLKNSEKSKFQQHVPFRESKLTHYFQSFFNGKGKICMIVNISQCYLAYDETLNVLKFSAIAQKVCVPDTLNSSQEKLFGPVKSSQDVSLDSNSNSKILNVKRATISWENSLEDLMEDEDLVEELENAEETQNVETKLLDEDLDKTLEENKAFISHEEKRKLLDLIEDLKKKLINEKKEKLTLEFKIREEVTQEFTQYWAQREADFKETLLQEREILEENAERRLAIFKDLVGKCDTREEAAKDICATKVETEEATACLELKFNQIKAELAKTKGELIKTKEELKKRENESDSLIQELETSNKKIITQNQRIKELINIIDQKEDTINEFQNLKSHMENTFKCNDKADTSSLIINNKLICNETVEVPKDSKSKICSERKRVNENELQQDEPPAKKGSIHVSSAITEDQKKSEEVRPNIAEIEDIRVLQENNEGLRAFLLTIENELKNEKEEKAELNKQIVHFQQELSLSEKKNLTLSKEVQQIQSNYDIAIAELHVQKSKNQEQEEKIMKLSNEIETATRSITNNVSQIKLMHTKIDELRTLDSVSQISNIDLLNLRDLSNGSEEDNLPNTQLDLLGNDYLVSKQVKEYRIQEPNRENSFHSSIEAIWEECKEIVKASSKKSHQIEELEQQIEKLQAEVKGYKDENNRLKEKEHKNQDDLLKEKETLIQQLKEELQEKNVTLDVQIQHVVEGKRALSELTQGVTCYKAKIKELETILETQKVECSHSAKLEQDILEKESIILKLERNLKEFQEHLQDSVKNTKDLNVKELKLKEEITQLTNNLQDMKHLLQLKEEEEETNRQETEKLKEELSASSARTQNLKADLQRKEEDYADLKEKLTDAKKQIKQVQKEVSVMRDEDKLLRIKINELEKKKNQCSQELDMKQRTIQQLKEQLNNQKVEEAIQQYERACKDLNVKEKIIEDMRMTLEEQEQTQVEQDQVLEAKLEEVERLATELEKWKEKCNDLETKNNQRSNKEHENNTDVLGKLTNLQDELQESEQKYNADRKKWLEEKMMLITQAKEAENIRNKEMKKYAEDRERFFKQQNEMEILTAQLTEKDSDLQKWREERDQLVAALEIQLKALISSNVQKDNEIEQLKRIISETSKIETQIMDIKPKRISSADPDKLQTEPLSTSFEISRNKIEDGSVVLDSCEVSTENDQSTRFPKPELEIQFTPLQPNKMAVKHPGCTTPVTVKIPKARKRKSNEMEEDLVKCENKKNATPRTNLKFPISDDRNSSVKKEQKVAIRPSSKKTYSLRSQASIIGVNLATKKKEGTLQKFGDFLQHSPSILQSKAKKIIETMSSSKLSNVEASKENVSQPKRAKRKLYTSEISSPIDISGQVILMDQKMKESDHQIIKRRLRTKTAK

SEQ ID NO: 625 - protein, 1369 aa, Homo sapiens
MGGKNKKHKAPAAAVVRAAVSASRAKSAEAGIAGEAQSKKPVSRPATAAAAAAGSREPRVKQGPKIYSFNSTNDSSGPANLDKSILKVVINNKLEQRIIGVINEHKKQNNDKGMISGRLTAKKLQDLYMALQAFSFKTKDIEDAMTNTLLYGGDLHSALDWLCLNLSDDALPEGFSQEFEEQQPKSRPKFQSPQIQATISPPLQPKTKTYEEDPKSKPKKEEKNMEVNMKEWILRYAEQQNEEEKNENSKSLEEEEKFDPNERYLHLAAKLLDAKEQAATFKLEKNKQGQKEAQEKIRKFQREMETLEDHPVFNPAMKISHQQNERKKPPVATEGESALNFNLFEKSAAATEEEKDKKKEPHDVRNFDYTARSWTGKSPKQFLIDWVRKNLPKSPNPSFEKVPVGRYWKCRVRVIKSEDDVLVVCPTILTEDGMQAQHLGATLALYRLVKGQSVHQLLPPTYRDVWLEWSDAEKKREELNKMETNKPRDLFIAKLLNKLKQQQQQQQQHSENKRENSEDPEESWENLVSDEDFSALSLESANVEDLEPVRNLFRKLQSTPKYQKLLKERQQLPVFKHRDSIVETLKRHRVVVVAGETGSGKSTQVPHFLLEDLLLNEWEASKCNIVCTQPRRISAVSLANRVCDELGCENGPGGRNSLCGYQIRMESRACESTRLLYCTTGVLLRKLQEDGLLSNVSHVIVDEVHERSVQSDFLLIILKEILQKRSDLHLILMSATVDSEKFSTYFTHCPILRISGRSYPVEVFHLEDIIEETGFVLEKDSEYCQKFLEEEEEVTINVTSKAGGIKKYQEYIPVQTGAHADLNPFYQKYSSRTQHAILYMNPHKINLDLILELLAYLDKSPQFRNIEGAVLIFLPGLAHIQQLYDLLSNDRRFYSERYKVIALHSILSTQDQAAAFTLPPPGVRKIVLATNIAETGITIPDVVFVIDTGRTKENKYHESSQMSSLVETFVSKASALQRQGRAGRVRDGFCFRMYTRERFEGFMDYSVPEILRVPLEELCLHIMKCNLGSPEDFLSKALDPPQLQVISNAMNLLRKIGACELNEPKLTPLGQHLAALPVNVKIGKMLIFGAIFGCLDPVATLAAVMTEKSPFTTPIGRKDEADLAKSALAMADSDHLTIYNAYLGWKKARQEGGYRSEITYCRRNFLNRTSLLTLEDVKQELIKLVKAAGFSSSTTSTSWEGNRASQTLSFQEIALLKAVLVAGLYDNVGKIIYTKSVDVTEKLACIVETAQGKAQVHPSSVNRDLQTHGWLLYQEKIRYARVYLRETTLITPFPVLLFGGDIEVQHRERLLSIDGWIYFQAPVKIAVIFKQLRVLIDSVLRKKLENPKMSLENDKILQIITELIKTENN

SEQ ID NO: 626 - protein, 1297 aa, Homo sapiens
MAVPSLWPWGACLPVIFLSLGFGLDTVEVCPSLDIRSEVAELRQLENCSVVEGHLQILLMFTATGEDFRGLSFPRLTQVTDYLLLFRVYGLESLRDLFPNLAVIRGTRLFLGYALVIFEMPHLRDVALPALGAVLRGAVRVEKNQELCHLSTIDWGLLQPAPGANHIVGNKLGEECADVCPGVLGAAGEPCAKTTFSGHTDYRCWTSSHCQRVCPCPHGMACTARGECCHTECLGGCSQPEDPRACVACRHLYFQGACLWACPPGTYQYESWRCVTAERCASLHSVPGRASTFGIHQGSCLAQCPSGFTRNSSSIFCHKCEGLCPKECKVGTKTIDSIQAAQDLVGCTHVEGSLILNLRQGYNLEPQLQHSLGLVETITGFLKIKHSFALVSLGFFKNLKLIRGDAMVDGNYTLYVLDNQNLQQLGSWVAAGLTIPVGKIYFAFNPRLCLEHIYRLEEVTGTRGRQNKAEINPRTNGDRAACQTRTLRFVSNVTEADRILLRWERYEPLEARDLLSFIVYYKESPFQNATEHVGPDACGTQSWNLLDVELPLSRTQEPGVTLASLKPWTQYAVFVRAITLTTEEDSPHQGAQSPIVYLRTLPAAPTVPQDVISTSNSSSHLLVRWKPPTQRNGNLTYYLVLWQRLAEDGDLYLNDYCHRGLRLPTSNNDPRFDGEDGDPEAEMESDCCPCQHPPPGQVLPPLEAQEASFQKKFENFLHNAITIPISPWKVTSINKSPQRDSGRHRRAAGPLRLGGNSSDFEIQEDKVPRERAVLSGLRHFTEYRIDIHACNHAAHTVGCSAATFVFARTMPHREADGIPGKVAWEASSKNSVLLRWLEPPDPNGLILKYEIKYRRLGEEATVLCVSRLRYAKFGGVHLALLPPGNYSARVRATSLAGNGSWTDSVAFYILGPEEEDAGGLHVLLTATPVGLTLLIVLAALGFFYGKKRNRTLYASVNPEYFSASDMYVPDEWEVPREQISIIRELGQGSFGMVYEGLARGLEAGEESTPVALKTVNELASPRECIEFLKEASVMKAFKCHHVVRLLGVVSQGQPTLVIMELMTRGDLKSHLRSLRPEAENNPGLPQPALGEMIQMAGEIADGMAYLAANKFVHRDLAARNCMVSQDFTVKIGDFGMTRDVYETDYYRKGGKGLLPVRWMAPESLKDGIFTTHSDVWSFGVVLWEIVTLAEQPYQGLSNEQVLKFVMDGGVLEELEGCPLQLQELMSRCWQPNPRLRPSFTHILDSIQEELRPSFRLLSFYYSPECRGARGSLPTTDAEPDSSPTPRDCSPQNGGPGH

SEQ ID NO: 627 - protein, 1866 aa, Homo sapiens
MDPVGLQLGNKNLWSCLVRLLTKDPEWLNAKMKFFLPNTDLDSRNETLDPEQRVILQLNKLHVQGSDTWQSFIHCVCMQLEVPLDLEVLLLSTFGYDDGFTSQLGAEGKSQPESQLHHGLKRPHQSCGSSPRRKQCKKQQLELAKKYLQLLRTSAQQRYRSQIPGSGQPHAFHQVYVPPILRRATASLDTPEGAIMGDVKVEDGADVSISDLFNTRVNKGPRVTVLLGKAGMGKTTLAHRLCQKWAEGHLNCFQALFLFEFRQLNLITRFLTPSELLFDLYLSPESDHDTVFQYLEKNADQVLLIFDGLDEALQPMGPDGPGPVLTLFSHLCNGTLLPGCRVMATSRPGKLPACLPAEAAMVHMLGFDGPRVEEYVNHFFSAQPSREGALVELQTNGRLRSLCAVPALCQVACLCLHHLLPDHAPGQSVALLPNMTQLYMQMVLALSPPGHLPTSSLLDLGEVALRGLETGKVIFYAKDIAPPLIAFGATHSLLTSFCVCTGPGHQQTGYAFTHLSLQEFLAALHLMASPKVNKDTLTQYVTLHSRWVQRTKARLGLSDHLPTFLAGLASCTCRPFLSHLAQGNEDCVGAKQAAVVQVLKKLATRKLTGPKVVELCHCVDETQEPELASLTAQSLPYQLPFHNFPLTCTDLATLTNILEHREAPIHLDFDGCPLEPHCPEALVGCGQIENLSFKSRKCGDAFAEALSRSLPTMGRLQMLGLAGSKITARGISHLVKALPLCPQLKEVSFRDNQLSDQVVLNIVEVLPHLPRLRKLDLSSNSICVSTLLCLARVAVTCPTVRMLQAREADLIFLLSPPTETTAELQRAPDLQESDGQRKGAQSRSLTLRLQKCQLQVHDAEALIALLQEGPHLEEVDLSGNQLEDEGCRLMAEAASQLHIARKLDLSNNGLSVAGVHCVLRAVSACWTLAELHISLQHKTVIFMFAQEPEEQKGPQERAAFLDSLMLQMPSELPLSSRRMRLTHCGLQEKHLEQLCKALGGSCHLGHLHLDFSGNALGDEGAARLAQLLPGLGALQSLNLSENGLSLDAVLGLVRCFSTLQWLFRLDISFESQHILLRGDKTSRDMWATGSLPDFPAAAKFLGFRQRCIPRSLCLSECPLEPPSLTRLCATLKDCPGPLELQLSCEFLSDQSLETLLDCLPQLPQLSLLQLSQTGLSPKSPFLLANTLSLCPRVKKVDLRSLHHATLHFRSNEEEEGVCCGRFTGCSLSQEHVESLCWLLSKCKDLSQVDLSANLLGDSGLRCLLECLPQVPISGLLDLSHNSISQESALYLLETLPSCPRVREASVNLGSEQSFRIHFSREDQAGKTLRLSECSFRPEHVSRLATGLSKSLQLTELTLTQCCLGQKQLAILLSLVGRPAGLFSLRVQEPWADRARVLSLLEVCAQASGSVTEISISETQQQLCVQLEFPRQEENPEAVALRLAHCDLGAHHSLLVGQLMETCARLQQLSLSQVNLCEDDDASSLLLQSLLLSLSELKTFRLTSSCVSTEGLAHLASGLGHCHHLEELDLSNNQFDEEGTKALMRALEGKWMLKRLDLSHLLLNSSTLALLTHRLSQMTCLQSLRLNRNSIGDVGCCHLSEALRAATSLEELDLSHNQIGDAGVQHLATILPGLPELRKIDLSGNSISSAGGVQLAESLVLCRRLEELMLGCNALGDPTALGLAQELPQHLRVLHLPFSHLGPGGALSLAQALDGSPHLEEISLAENNLAGGVLRFCMELPLLRQIDLVSCKIDNQTAKLLTSSFTSCPALEVILLSWNLLGDEAAAELAQVLPQMGRLKRVDLEKNQITALGAWLLAEGLAQGSSIQVIRLWNNPIPCDMAQHLKSQEPRLDFAFFDNQPQAPWGT

SEQ ID NO: 628 - protein, 1469 aa, Homo sapiens
MWPSQLLIFMMLLAPIIHAFSRAPIPMAVVRRELSCESYPIELRCPGTDVIMIESANYGRTDDKICDSDPAQMENIRCYLPDAYKIMSQRCNNRTQCAVVAGPDVFPDPCPGTYKYLEVQYECVPYKVEQKVFLCPGLLKGVYQSEHLFESDHQSGAWCKDPLQASDKIYYMPWTPYRTDTLTEYSSKDDFIAGRPTTTYKLPHRVDGTGFVVYDGALFFNKERTRNIVKFDLRTRIKSGEAIIANANYHDTSPYRWGGKSDIDLAVDENGLWVIYATEQNNGKIVISQLNPYTLRIEGTWDTAYDKRSASNAFMICGILYVVKSVYEDDDNEATGNKIDYIYNTDQSKDSLVDVPFPNSYQYIAAVDYNPRDNLLYVWNNYHVVKYSLDFGPLDSRSGQAHHGQVSYISPPIHLDSELERPSVKDISTTGPLGMGSTTTSTTLRTTTLSPGRSTTPSVSGRRNRSTSTPSPAVEVLDDMTTHLPSASSQIPALEESCEAVEAREIMWFKTRQGQIAKQPCPAGTIGVSTYLCLAPDGIWDPQGPDLSNCSSPWVNHITQKLKSGETAANIARELAEQTRNHLNAGDITYSVRAMDQLVGLLDVQLRNLTPGGKDSAARSLNKLQKRERSCRAYVQAMVETVNNLLQPQALNAWRDLTTSDQLRAATMLLHTVEESAFVLADNLLKTDIVRENTDNIKLEVARLSTEGNLEDLKFPENMGHGSTIQLSANTLKQNGRNGEIRVAFVLYNNLGPYLSTENASMKLGTEALSTNHSVIVNSPVITAAINKEFSNKVYLADPVVFTVKHIKQSEENFNPNCSFWSYSKRTMTGYWSTQGCRLLTTNKTHTTCSCNHLTNFAVLMAHVEVKHSDAVHDLLLDVITWVGILLSLVCLLICIFTFCFFRGLQSDRNTIHKNLCISLFVAELLFLIGINRTDQPIACAVFAALLHFFFLAAFTWMFLEGVQLYIMLVEVFESEHSRRKYFYLVGYGMPALIVAVSAAVDYRSYGTDKVCWLRLDTYFIWSFIGPATLIIMLNVIFLGIALYKMFHHTAILKPESGCLDNINYEDNRPFIKSWVIGAIALLCLLGLTWAFGLMYINESTVIMAYLFTIFNSLQGMFIFIFHCVLQKKVRKEYGKCLRTHCCSGKSTESSIGSGKTSGSRTPGRYSTGSQSRIRRMWNDTVRKQSESSFITGDINSSASLNREGLLNNARDTSVMDTLPLNGNHGNSYSIASGEYLSNCVQIIDRGYNHNETALEKKILKELTSNYIPSYLNNHERSSEQNRNLMNKLVNNLGSGREDDAIVLDDATSFNHEESLGLELIHEESDAPLLPPRVYSTENHQPHHYTRRRIPQDHSESFFPLLTNEHTEDLQSPHRDSLYTSMPTLAGVAATESVTTSTQTEPPPAKCGDAEDVYYKSMPNLGSRNHVHQLHTYYQLGRGSSDGFIVPPNKDGTPPEGSSKGPAHLVTSL

SEQ ID NO: 629 - protein, 2226 aa, Homo sapiens
MVLAGLIRKLGHQLAEIRERALKSILCKIEHNLICYADLIQERQLFLHLLEWFNFPSVPMKEEVLNLLSRLVKYPPAVQHLVDVGAVEFLSKLRSNVEPNLQAEIDGILDGLFLLPSEVPALSSASYQTNQTELSKNPEILTGYFPQDKSNFQQMEVPPRPVVNQTVKCLKFSTFPWLPLTTTDRHVLSSNESSLRSSNHTLIWNTCELLKDVIMQDFPAEIFLQRPKIVQSLLSLLKLAFGDGKHRLALQSVSCLQQLCMYLRNRLNFHRDPGFFSNKHDTVSQNSSLSYCHEARGTHHSQNPSPGSSSPRPSVVGRTGQRPRGDGQDWDAASSSGSSSHAHVNSRISVHSPLDMGHIDLPELETEDTLELQFQQLSLPQFCVSILESAVPLLRTGSRQVIIRVLELLTEDMTLIGEAISTDIWDDSSLFGIDMKEKLLLVLGALGETMCYHKSSISLEQPEVMLVHHRMAFISISLFAVRLLQTLLPVEKASEFLSEPMSTALFLLSLDMPISLEYPNIHEAVVAYLEQLNSENYSIYKRTAEAVYSIECTCNFLSDIGKEGEKNLLELVELADQALRSFSYHQHFPLIKEIISICSKIWKSAQASPLLQGESQKVLLHMLSHPLPRVKAETYHCCLEITKECLGVHNVTKPVSSLCNGIHFLLHPKVLYEISVFGIQEPESEVNTAAKAILLYLLQGRLMMTALTWNKFIESLCPVIPILQGYADTEDPLGNCILLLSKASSDTEEMLPCTTRLKSMLRLLLVKKPSVRSLALKLLAFHLTSEEGADTKRPLIDARVLSRVTDLFIGKKPIELRLDDRRELVIKLETVEKVYEIFTSDDVDLVLRKSAAEQLAVIMQDIKMHAVVKKLCLIDKIIEYLNECVSQDGKVVECLVQPCLTLLRKVLCGDPVMRVSLSQQSSLLTVLFRVSLIFHEDCSVVTEVGALFCLLLFDEVSRMDMWSVNPSNKPSLPSVFSLPVSVFRRYHLPVHVIGHHAVSPYSIVLPLSADCLALKPVSDMLRIAWNLSWYHGSDNLLKQMNSETKTQEILDALKLSTEDILTLKITHMASGLQDCLHSIVQAATHREVRAAVTRMSFYLLNDRLSLKGCPGPCGVTLKSLAWHTALNRFLQVLPACTEDEKLLIDIIHFLNKLIKEQRKNSSLELLNWILELLLRHSANPLLDLLVLTESQAREETDDIRTAVRQQLQKELIALFDTLLLNFMEVTDRKCSELLYVFQTQLALKLLQCLKVTDAPHFYGLPSLERTLRGMANLTAFPGWSSHSPLTKPLDICVKYLSGLLEVITSFYVERGGNAMSFMGKGVTKSTILCLLHLSHEMMAQAGSLEWMSLWFLPLGSHSEEHIPTQQGLAWLIPLWVDRDPEVRFTSLGLGSALTTLETGCVALANSCQNISGGLWGTVVNILLDQSECSMVRREAAFILQNLLVIPMPTEIIKDYTWQGPCVHDEDSGLSLIGKPALQALLYHCHFYEHLNQMVKHCYLGRCMFDLNFSAFDRNSESNDLNGLDDSFKFWRAPSRTSQDRDPSSLSTSETTVAPSLGSTEFQPLVQSTTLLPEASHDQFVAQGHQESTSPRPPHDSSLSAPLPKLCVFVTPSLLSAMCSLLDNLLTIAPRDTAKAFRQAHLIELLCSIADATLIQTCVQELRALLPSSPPAEHTQAQVSFLLEYLSSLSRLLQSCLLVEPDLVIQDELVKPLITNIIGILTICTKDVLDKELISAFYHTWTHLFNLLAMLLRKAGAITLPFVTVALAKHWTAAIDMFCTCAGLSATCPALYTASLQFLSVLLTEEAKGHLQAKSKTHLCCSPTVASLLDDSQENQKSLEQLSDVILQCYEGKSSKDILKRVAANALMSLLAVSRRAQKHALKANLIDNCMEQMKHINAQLNLDSLRPGKAALKKKEDGVIKELSIAMQLLRNCLYQNEECKEAALEAHLVPVLHSLWPWILMDDSLMQISLQLLCVYTANFPNGCSSLCWSSCGQHPVQATHRGAVSNSLMLCILKLASQMPLENTTVQQMVFMLLSNLALSHDCKGVIQKSNFLQNFLSLALPKGGNKHLSNLTILWLKLLLNISSGEDGQQMILRLDGCLDLLTEMSKYKHKSSPLLPLLIFHNVCFSPANKPKILANEKVITVLAACLESENQNAQRIGAAALWALIYNYQKAKTALKSPSVKRRVDEAYSLAKKTFPNSEANPLNAYYLKCLENLVQLLNSS

SEQ ID NO: 630 - protein, 417 aa, Homo sapiens
MAWFALYLLSLLWATAGTSTQTQSSCSVPSAQEPLVNGIQVLMENSVTSSAYPNPSILIAMNLAGAYNLKAQKLLTYQLMSSDNNDLTIGQLGLTIMALTSSCRDPGDKVSILQRQMENWAPSSPNAEASAFYGPSLAILALCQKNSEATLPIAVRFAKTLLANSSPFNVDTGAMATLALTCMYNKIPVGSEEGYRSLFGQVLKDIVEKISMKIKDNGIIGDIYSTGLAMQALSVTPEPSKKEWNCKKTTDMILNEIKQGKFHNPMSIAQILPSLKGKTYLDVPQVTCSPDHEVQPTLPSNPGPGPTSASNITVIYTINNQLRGVELLFNETINVSVKSGSVLLVVLEEAQRKNPMFKFETTMTSWGLVVSSINNIAENVNHKTYWQFLSGVTPLNEGVADYIPFNHEHITANFTQY

SEQ ID NO: 631 - protein, 1075 aa, Homo sapiens
MVVEVDSMPAASSVKKPFGLRSKMGKWCCRCFPCYRESGKSNVGTSGDHDDSAMKTLRSKMGKWCHHCFPCCRGSGKSNVGASGDHDDSAMKTLRNKMGKWCCHCFPCCRGSGKSKVGAWGDYDDSAFMEPRYHVRGEDLDKLHRAAWWGKVPRKDLIVMLRDTDVNKKDKQKRTALHLASANGNSEVVKLLLDRRCQLNVLDNKKRTALIKAVQCQEDECALMLLEHGTDPNIPDEYGNTTLHYAIYNEDKLMAKALLLYGADIESKNKHGLTPLLLGVHEQKQQVVKFLIKKKANLNALDRYGRTALILAVCCGSASIVSLLLEQNIDVSSQDLSGQTAREYAVSSHHHVICQLLSDYKEKQMLKISSENSNPEQELKLTSEEESQRFKGSENSQPEKMSQELEINKDGDREVEEEMKKHESNNVGLLENLTNGVTAGNGDNGLIPQRKSRTPENQQFPDNESEEYHRICELLSDYKEKQMPKYSSENSNPEQDLKLTSEEESQRLKGSENGQPEKRSQEPEINKDGDRELENFMAIEEMKKHGSTHVGFPENLTNGATAGNGDDGLIPPRKSRTPESQQFPDTENEEYHSDEQNDTQKQFCEEQNTGILHDEILIHEEKQIEVVEKMNSELSLSCKKEKDVLHENSTLREEIAMLRLELDTMKHQSQLREKKYLEDIESVKKKNDNLLKALQLNELTMDDDTAVLVIDNGSGMCKAGFAGDDAPRAVFPSIVGRPRQQGMMGGMHQKESYVGKEAQSKRGILTLKYPMEHGIITNWDDMEKIWHHTFYNELRVAPEEHPILLTEAPLNPKANREKMTQIMFETFNTPAMYVAIQAVPSLYTSGRTTGIVMDSGDGVTHTVPIYEGNALPHATLRLDLAGRELPDYLMKILTERGYRFTTMAEREIVRDIKEKLCYVALDFEQEMATAASSSSLEKSYELPDGQVITIGNERFRCPEALFQPCFLGMESCGIHETTFNSIMKSDVDIRKDLYTNTVLSGGTTMYPGMAHRMQKEIAALAPSMMKIRIIAPPKRKYSVWVGGSILASLSTFQQMWISKQEYDESGPSIVHRKCF

SEQ ID NO: 632 - protein, 1939 aa, Homo sapiens
MSSDSEMAIFGEAAPFLRKSERERIEAQNKPFDAKTSVFVVDPKESFVKATVQSREGGKVTAKTEAGATVTVKDDQVFPMNPPKYDKIEDMAMMTHLHEPAVLYNLKERYAAWMIYTYSGLFCVTVNPYKWLPVYNAEVVTAYRGKKRQEAPPHIFSISDNAYQFMLTDRENQSILITGESGAGKTVNTKRVIQYFATIAVTGEKKKEEVTSGKMQGTLEDQIISANPLLEAFGNAKTVRNDNSSRFGKFIRIHFGTTGKLASADIETYLLEKSRVTFQLKAERSYHIFYQIMSNKKPDLIEMLLITTNPYDYAFVSQGEITVPSIDDQEELMATDSAIEILGFTSDERVSIYKLTGAVMHYGNMKFKQKQREEQAEPDGTEVADKAAYLQNLNSADLLKALCYPRVKVGNEYVTKGQTVQQVYNAVGALAKAVYDKMFLWMVTRINQQLDTKQPRQYFIGVLDIAGFEIFDFNSLEQLCINFTNEKLQQFFNHHMFVLEQEEYKKEGIEWTFIDFGMDLAACIELIEKPMGIFSILEEECMFPKATDTSFKNKLYEQHLGKSNNFQKPKPAKGKPEAHFSLIHYAGTVDYNIAGWLDKNKDPLNETVVGLYQKSAMKTLALLFVGATGAEAEAGGGKKGGKKKGSSFQTVSALFRENLNKLMTNLRSTHPHFVRCIIPNETKTPGAMEHELVLHQLRCNGVLEGIRICRKGFPSRILYADFKQRYKVLNASAIPEGQFIDSKKASEKLLGSIDIDHTQYKFGHTKVFFKAGLLGLLEEMRDEKLAQLITRTQAMCRGFLARVEYQKMVERRESIFCIQYNVRAFMNVKHWPWMKLYFKIKPLLKSAETEKEMANMKEEFEKTKEELAKTEAKRKELEEKMVTLMQEKNDLQLQVQAEADSLADAEERCDQLIKTKIQLEAKIKEVTERAEDEEEINAELTAKKRKLEDECSELKKDIDDLELTLAKVEKEKHATENKVKNLTEEMAGLDETIAKLTKEKKALQEAHQQTLDDLQAEEDKVNTLTKAKIKLEQQVDDLEGSLEQEKKIRMDLERAKRKLEGDLKLAQESTMDIENDKQQLDEKLKKKEFEMSGLQSKIEDEQALGMQLQKKIKELQARIEELEEEIEAERASRAKAEKQRSDLSRELEEISERLEEAGGATSAQIEMNKKREAEFQKMRRDLEEATLQHEATAATLRKKHADSVAELGEQIDNLQRVKQKLEKEKSEMKMEIDDLASNMETVSKAKGNLEKMCRALEDQLSEIKTKEEEQQRLINDLTAQRARLQTESGEYSRQLDEKDTLVSQLSRGKQAFTQQIEELKRQLEEEIKAKSALAHALQSSRHDCDLLREQYEEEQEAKAELQRAMSKANSEVAQWRTKYETDAIQRTEELEEAKKKLAQRLQDAEEHVEAVNAKCASLEKTKQRLQNEVEDLMIDVERTNAACAALDKKQRNFDKILAEWKQKCEETHAELEASQKESRSLSTELFKIKNAYEESLDQLETLKRENKNLQQEISDLTEQIAEGGKRIHELEKIKKQVEQEKSELQAALEEAEASLEHEEGKILRIQLELNQVKSEVDRKIAEKDEEIDQMKRNHIRIVESMQSTLDAEIRSRNDAIRLKKKMEGDLNEMEIQLNHANRMAAEALRNYRNTQAILKDTQLHLDDALRSQEDLKEQLAMVERRANLLQAEIEELRATLEQTERSRKIAEQELLDASERVQLLHTQNTSLINTKKKLETDISQIQGEMEDIIQEARNAEEKAKKAITDAAMMAEELKKEQDTSAHLERMKKNLEQTVKDLQHRLDEAEQLALKGGKKQIQKLEARVRELEGEVESEQKRNVEAVKGLRKHERKVKELTYQTEEDRKNILRLQDLVDKLQAKVKSYKRQAEEAEEQSNVNLSKFRRIQHELEEAEERADIAESQVNKLRVKSREVHTKIISEE

SEQ ID NO: 633 - protein, 1941 aa, Homo sapiens
MSSDSELAVFGEAAPFLRKSERERIEAQNRPFDAKTSVFVAEPKESFVKGTIQSREGGKVTVKTEGGATLTVKDDQVFPMNPPKYDKIEDMAMMTHLHEPAVLYNLKERYAAWMIYTYSGLFCVTVNPYKWLPVYKPEVVTAYRGKKRQEAPPHIFSISDNAYQFMLTDRENQSILITGESGAGKTVNTKRVIQYFATIAVTGEKKKEEITSGKIQGTLEDQIISANPLLEAFGNAKTVRNDNSSRFGKFIRIHFGTTGKLASADIETYLLEKSRVVFQLKAERSYHIFYQITSNKKPELIEMLLITTNPYDYPFVSQGEISVASIDDQEELMATDSAIDILGFTNEEKVSIYKLTGAVMHYGNLKFKQKQREEQAEPDGTEVADKAAYLQSLNSADLLKALCYPRVKVGNEYVTKGQTVEQVSNAVGALAKAVYEKMFLWMVARINQQLDTKQPRQYFIGVLDIAGFEIFDFNSLEQLCINFTNEKLQQFFNHHMFVLEQEEYKKEGIEWTFIDFGMDLAACIELIEKPMGIFSILEEECMFPKATDTSFKNKLYDQHLGKSANFQKPKVVKGKAEAHFALIHYAGVVDYNITGWLEKNKDPLNETVVGLYQKSAMKTLAQLFSGAQTAEGEGAGGGAKKGGKKKGSSFQTVSALFRENLNKLMTNLRSTHPHFVRCIIPNETKTPGAMEHELVLHQLRCNGVLEGIRICRKGFPSRILYADFKQRYKVLNASAIPEGQFIDSKKASEKLLASIDIDHTQYKFGHTKVFFKAGLLGLLEEMRDDKLAQLITRTQARCRGFLARVEYQRMVERREAIFCIQYNIRSFMNVKHWPWMKLFFKIKPLLKSAETEKEMATMKEEFQKIKDELAKSEAKRKELEEKMVTLLKEKNDLQLQVQAEAEGLADAEERCDQLIKTKIQLEAKIKEVTERAEDEEEINAELTAKKRKLEDECSELKKDIDDLELTLAKVEKEKHATENKVKNLTEEMAGLDETIAKLTKEKKALQEAHQQTLDDLQAEEDKVNTLTKAKIKLEQQVDDLEGSLEQEKKLRMDLERAKRKLEGDLKLAQESIMDIENEKQQLDEKLKKKEFEISNLQSKIEDEQALGIQLQKKIKELQARIEELEEEIEAERASRAKAEKQRSDLSRELEEISERLEEAGGATSAQIEMNKKREAEFQKMRRDLEEATLQHEATAATLRKKHADSVAELGEQIDNLQRVKQKLEKEKSEMKMEIDDLASNVETVSKAKGNLEKMCRTLEDQLSELKSKEEEQQRLINDLTAQRGRLQTESGEFSRQLDEKEALVSQLSRGKQAFTQQIEELKRQLEEEIKAKNALAHALQSSRHDCDLLREQYEEEQESKAELQRALSKANTEVAQWRTKYETDAIQRTEELEEAKKKLAQRLQAAEEHVEAVNAKCASLEKTKQRLQNEVEDLMLDVERTNAACAALDKKQRNFDKILAEWKQKCEETHAELEASQKEARSLGTELFKIKNAYEESLDQLETLKRENKNLQQEISDLTEQIAEGGKRIHELEKIKKQVEQEKCELQAALEEAEASLEHEEGKILRIQLELNQVKSEVDRKIAEKDEEIDQLKRNHIRIVESMQSTLDAEIRSRNDAIRLKKKMEGDLNEMEIQLNHANRMAAEALRNYRNTQGILKDTQIHLDDALRSQEDLKEQLAMVERRANLLQAEIEELRATLEQTERSRKIAEQELLDASERVQLLHTQNTSLINTKKKLETDISQMQGEMEDILQEARNAEEKAKKAITDAAMMAEELKKEQDTSAHLERMKKNMEQTVKDLQLRLDEAEQLALKGGKKQIQKLEARVRELEGEVESEQKRNAEAVKGLRKHERRVKELTYQTEEDRKNILRLQDLVDKLQAKVKSYKRQAEEAEEQSNTNLAKFRKLQHELEEAEERADIAESQVNKLRVKSREVHTKVISEE

SEQ ID NO: 634 - protein, 129 aa, Homo sapiens
  MOD_RES (102)..(102): Any amino acid
METPAQLLFLLLLWLPDTTGEIVLTQSPGTLSLSPGERATLSCRASQSVSSSYLAWYQQKPGQAPRLLIYGASSRATGIPDRFSGSGSGTDFTLTISRLEPXDFAVYYCQQYGSSPWTFGQGTKVEIKR

SEQ ID NO: 635 - protein, 148 aa, Homo sapiens
MKALIVLGLVLLSVTVQGKVFERCELARTLKRLGMDGYRGISLANWMCLAKWESGYNTRATNYNAGDRSTDYGIFQINSRYWCNDGKTPGAVNACHLSCSALLQDNIADAVACAKRVVRDPQGIRAWVAWRNRCQNRDVRQYVQGCGV

SEQ ID NO: 636 - protein, 109 aa, Homo sapiens
EIVLTQSPGTLSLSPGERATLSCRASQSVSNSFLAWYQQKPGQAPRLLIYVASSRATGIPDRFSGSGSGTDFTLTISRLEPEDFAVYYCQQYGSSPSTFGQGTKVELKR

SEQ ID NO: 637 - protein, 109 aa, Homo sapiens [sequence omitted]

SEQ ID NO: 638 - protein, 106 aa, Homo sapiens
GQPKAAPSVTLFPPSSEELQANKATLVCLISDFYPGAVKVAWKADGSPVNTGVETTTPSKQSNNKYAASSYLSLTPEQWKSHRSYSCQVTHEGSTVEKTVAPAECS

SEQ ID NO: 639 - protein, 175 aa, Homo sapiens
MLPPMALPSVSWMLLSCLMLLSQVQGEEPQRELPSARIRCPKGSKAYGSHCYALFLSPKSWTDADLACQKRPSGNLVSVLSGAEGSFVSSLVKSIGNSYSYVWIGLHDPTQGTEPNGEGWEWSSSDVMNYFAWERNPSTISSPGHCASLSRSTAFLRWKDYNCNVRLPYVCKFTD

SEQ ID NO: 640 - protein, 106 aa, Homo sapiens
GQPKAAPSVTLFPPSSEELQANKATLVCLVSDFYPGAVTVAWKADGSPVKVGVETTKPSKQSNNKYAASSYLSLTPEQWKSHRSYSCRVTHEGSTVEKTVAPAECS

SEQ ID NO: 641 - protein, 2413 aa, Homo sapiens
MGISTVILEMCLLWGQVLSTGGWIPRTTDYASLIPSEVPLDPTVAEGSPFPSESTLESTVAEGSPISLESTLESTVAEGSLIPSESTLESTVAEGSDSGLALRLVNGDGRCQGRVEILYRGSWGTVCDDSWDTNDANVVCRQLGCGWAMSAPGNAWFGQGSGPIALDDVRCSGHESYLWSCPHNGWLSHNCGHGEDAGVICSAAQPQSTLRPESWPVRISPPVPTEGSESSLALRLVNGGDRCRGRVEVLYRGSWGTVCDDYWDTNDANVVCRQLGCGWAMSAPGNAQFGQGSGPIVLDDVRCSGHESYLWSCPHNGWLTHNCGHSEDAGVICSAPQSRPTPSPDTWPTSHASTAGPESSLALRLVNGGDRCQGRVEVLYRGSWGTVCDDSWDTSDANVVCRQLGCGWATSAPGNARFGQGSGPIVLDDVRCSGYESYLWSCPHNGWLSHNCQHSEDAGVICSAAHSWSTPSPDTLPTITLPASTVGSESSLALRLVNGGDRCQGRVEVLYRGSWGTVCDDSWDTNDANVVCRQLGCGWAMLAPGNARFGQGSGPIVLDDVRCSGNESYLWSCPHNGWLSHNCGHSEDAGVICSGPESSLALRLVNGGDRCQGRVEVLYRGSWGTVCDDSWDTNDANVVCRQLGCGWATSAPGNARFGQGSGPIVLDDVRCSGHESYLWSCPNNGWLSHNCGHHEDAGVICSAAQSRSTPRPDTLSTITLPPSTVGSESSLTLRLVNGSDRCQGRVEVLYRGSWGTVCDDSWDTNDANVVCRQLGCGWATSAPGNARFGQGSGPIVLDDVRCSGHESYLWSCPHNGWLSHNCGHHEDAGVICSVSQSRPTPSPDTWPTSHASTAGPESSLALRLVNGGDRCQGRVEVLYRGSWGTVCDDSWDTSDANVVCRQLGCGWATSAPGNARFGQGSGPIVLDDVRCSGYESYLWSCPHNGWLSHNCQHSEDAGVICSAAHSWSTPSPDTLPTITLPASTVGSESSLALRLVNGGDRCQGRVEVLYQGSWGTVCDDSWDTNDANVVCRQLGCGWAMSAPGNARFGQGSGPIVLDDVRCSGHESYLWSCPHNGWLSHNCGHSEDAGVICSASQSRPTPSPDTWPTSHASTAGSESSLALRLVNGGDRCQGRVEVLYRGSWGTVCDDYWDTNDANVVCRQLGCGWAMSAPGNARFGQGSGPIVLDDVRCSGHESYLWSCPHNGWLSHNCGHHEDAGVICSASQSQPTPSPDTWPTSHASTAGSESSLALRLVNGGDRCQGRVEVLYRGSWGTVCDDYWDTNDANVVCRQLGCGWATSAPGNARFGQGSGPIVLDDVRCSGHESYLWSCPHNGWLSHNCGHHEDAGVICSASQSQPTPSPDTWPTSHASTAGSESSLALRLVNGGDRCQGRVEVLYRGSWGTVCDDYWDTNDANVVCRQLGCGWATSAPGNARFGQGSGPIVLDDVRCSGHESYLWSCPHNGWLSHNCGHHEDAGVICSASQSQPTPSPDTWPTSRASTAGSESTLALRLVNGGDRCRGRVEVLYQGSWGTVCDDYWDTNDANVVCRQLGCGWAMSAPGNAQFGQGSGPIVLDDVRCSGHESYLWSCPHNGWLSHNCGHHEDAGVICSAAQSQSTPRPDTWLTTNLPALTVGSESSLALRLVNGGDRCRGRVEVLYRGSWGTVCDDSWDTNDANVVCRQLGCGWAMSAPGNARFGQGSGPIVLDDVRCSGNESYLWSCPHKGWLTHNCGHHEDAGVICSATQINSTTTDWWHPTTTTTARPSSNCGGFLFYASGTFSSPSYPAYYPNNAKCVWEIEVNSGYRINLGFSNLKLEAHHNCSFDYVEIFDGSLNSSLLLGKICNDTRQIFTSSYNRMTIHFRSDISFQNTGFLAWYNSFPSDATLRLVNLNSSYGLCAGRVEIYHGGTWGTVCDDSWTIQEAEVVCRQLGCGRAVSALGNAYFGSGSGPITLDDVECSGTESTLWQCRNRGWFSHNCNHREDAGVICSGNHLSTPAPFLNITRPNTDYSCGGFLSQPSGDFSSPFYPGNYPNNAKCVWDIEVQNNYRVTVIFRDVQLEGGCNYDYIEVFDGPYRSSPLIARVCDGARGSFTSSSNFMSIRFISDHSITRRGFRAEYYSSPSNDSTNLLCLPNHMQASVSRSYLQSLGFSASDLVISTWNGYYECRPQITPNLVIFTIPYSGCGTFKQADNDTIDYSNFLTAAVSGGIIKRRTDLRIHVSCRMLQNTWVDTMYIANDTIHVANNTIQVEEVQYGNFDVNISFYTSSSFLYPVTSRPYYVDLNQDLYVQAEILHSDAVLTLFVDTCVASPYSNDFTSLTYDLIRSGCVRDDTYGPYSSPSLRIARFRFRAFHFLNRFPSVYLRCKMVVCRAYDPSSRCYRGCVLRSKRDVGSYQEKVDVVLGPIQLQTPPRREEEPR

SEQ ID NO: 642 - protein, 117 aa, Homo sapiens
MEFGLSWLFLVAILKGVQCEVQLLESGGGLVQPGGSLRLSCAASGFTFSSYAMSWVRQAPGKGLEWVSAISGSGGSTYYGDSVKGRFTISRDNSKNTLYLQMNSLRAEDTAVYYCAK

SEQ ID NO: 643 - protein, 434 aa, Homo sapiens
MSILKIHAREIFDSRGNPTVEVDLFTSKGLFRAAVPSGASTGIYEALELRDNDKTRYMGKGVSKAVEHINKTIAPALVSKKLNVTEQEKIDKLMIEMDGTENKSKFGANAILGVSLAVCKAGAVEKGVPLYRHIADLAGNSEVILPVPAFNVINGGSHAGNKLAMQEFMILPVGAANFREAMRIGAEVYHNLKNVIKEKYGKDATNVGDEGGFAPNILENKEGLELLKTAIGKAGYTDKVVIGMDVAASEFFRSGKYDLDFKSPDDPSRYISPDQLADLYKSFIKDYPVVSIEDPFDQDDWGAWQKFTASAGIQVVGDDLTVTNPKRIAKAVNEKSCNCLLLKVNQIGSVTESLQACKLAQANGWGVMVSHRSGETEDTFIADLVVGLCTGQIKTGAPCRSERLAKYNQLLRIEEELGSKAKFAGRNFRNPLAK

SEQ ID NO: 644 - protein, 364 aa, Homo sapiens
MAHRFPALTQEQKKELSEIAQSIVANGKGILAADESVGTMGNRLQRIKVENTEENRRQFREILFSVDSSINQSIGGVILFHETLYQKDSQGKLFRNILKEKGIVVGIKLDQGGAPLAGTNKETTIQGLDGLSERCAQYKKDGVDFGKWRAVLRIADQCPSSLAIQENANALARYASICQQNGLVPIVEPEVIPDGDHDLEHCQYVTEKVLAAVYKALNDHHVYLEGTLLKPNMVTAGHACTKKYTPEQVAMATVTALHRTVPAAVPGICFLSGGMSEEDATLNLNAINLCPLPKPWKLSFSYGRALQASALAAWGGKAANKEATQEAFMKRAMANCQAAKGQYVHTGSSGAASTQSLFTACYTY

SEQ ID NO: 645 - protein, 6885 aa, Homo sapiens
MASSPELPTEDEQGSWGIDDLHISLQAEQEDTQKKAFTCWINSQLARHTSPSVISDLFTDIKKGHVLLDLLEVLSGQQLPRDKGSNTFQCRINIEHALTFLRNRSIKLINIHVTDIIDGNPSIILGLIWTIILHFHIEKLAQTLSCNYNQPSLDDVSVVDSSPASSPPAKKCSKVQARWQMSARKALLLWAQEQCATYESVNVTDFKSSWRNGMAFLAIIHALRPDLIDMKSVKHRSNKDNLREAFRIAEQELKIPRLLEPEDVDVVDPDEKSIMTYVAQFLQYSKDAPGTGEEAQGKVKDAMGWLTLQKEKLQKLLKDSENDTYFKKYNSLLSFMESFNEEKKSFLDVLSIKRDLDELDKDHLQLREAWDGLDHQINAWKIKLNYALPPPLHQTEAWLQEVEELMDEDLSASQDHSQAVTLIQEKMTLFKSLMDRFEHHSNILLTFENKDENHLPLVPPNKLEEMKRRINNILEKKFILLLEFHYYKCLVLGLVDEVKSKLDIWNIKYGSRESVELLLEDWHKFIEEKEFLARLDTSFQKCGEIYKNLAGECQNINKQYMMVKSDVCMYRKNIYNVKSTLQKVLACWATYVENLRLLRACFEETKKEEIKEVPFETLAQWNLEHATLNEAGNFLVEVSNDVVGSSISKELRRLNKRWRKLVSKTQLEMNLPLMIKKQDQPTFDNSGNILSKEEKATVEFSTDMSVELPENYNQNIKAGEKHEKENEEFTGQLKVAKDVEKLIGQVEIWEAEAKSVLDQDDVDTSMEESLKHLIAKGSMFDELMARSEDMLQMDIQNISSQESFQHVLTTGLQAKIQEAKEKVQINVVKLIAALKNLTDVSPDLDIRLKMEESQKELESYMMRAQQLLGQRESPGELISKHKEALIISNTKSLAKYLKAVEELKNNVTEDIKMSLEEKSRDVCAKWESLHHELSLYVQQLKIDIEKGKLSDNILKLEKQINKEKKLIRRGRTKGLIKEHEACFSEEGCLYQLNHHMEVLRELCEELPSQKSQQEVKRLLKDYEQKIERLLKCASEIHMTLQPTAGGTSKNEGTITTSENRGGDPHSEAPFAKSDNQPSTEKAMEPTMKFSLASVLRPLQEESIMEKDYSASINSLLERYDTYRDILEHHLQNNKFRITSDFSSEEDRSSSCLQAKLTDLQVIKNETDARWKEFEIISLKLENHVNDIKKPFVIKERDTLKERERELQMTLNTRMESLETALRLVLPVEKASLLLCGSDLPLHKMAIQGFHLIDADRIYQHLRNIQDSIAKQIEICNRLEEPGNFVLKELHPFDLHAMQNIILKYKTQFEGMNHRVQRSEDTLKALEDFLASLRTAKLSAEPVTDLSASDTQVAQENTLTVKNKEGEIHLMKDKAKHLDKCLKMLDMSFKDAERGDDTSCENLLDAFSIKLSETHGYGVQEEFTEENKLLEACIFKNNELLKNIQDVQSQISKIGLKDPTVPAVKHRKKSLIRLDKVLDEYEEEKRHLQEMANSLPHFKDGREKTVNQQCQNTVVLWENTKALVTECLEQCGRVLELLKQYQNFKSILTTLIQKEESVISLQASYMGKENLKKRIAEIEIVKEEFNEHLEVVDKINQVCKNLQFYLNKMKTFEEPPFEKEANIIVDRWLDINEKTEDYYENLGRALALWDKLFNLKNVIDEWTEKALQKMELHQLTEEDRERLKEELQVHEQKTSEFSRRVAEIQFLLQSSEIPLELQVMESSILNKMEHVQKCLTGESNCHALSGSTAELREDLDQAKTQIGMTESLLKALSPSDSLEIFTKLEEIQQQILQQKHSMILLENQIGCLTPELSELKKQYESVSDLFNTKKSVLQDHFSKLLNDQCKNFNDWFSNIKVNLKECFESSETKKSVEQKLQKLSDFLTLEGRNSKIKQVDSVLKHVKKHLPKAHVKELISWLVGQEFELEKMESICQARAKELEDSLQQLLRLQDDHRNLRKWLTNQEEKWKGMEEPGEKTELFCQALARKREQFESVAQLNNSLKEYGFTEEEEIIMEATCLMDRYQTLLRQLSEIEEEDKLLPTEDQSFNDLAHDVIHWIKEIKESLMVLNSSEGKMPLEERIQKIKEIILLKPEGDARIETIMKQAESSEAPLVQKTLTDISNQWDNTLHLASTYLSHQEKLLLEGEKYLQSKEDLRLMLIELKKKQEAGFALQHGLQEKKAQLKIYKKFLKKAQDLTSLLKELKSQGNYLLECTKNPSFSEEPWLEIKHLHESLLQQLQDSVQNLDGHVREHDSYQVCVTDLNTTLDNFSKEFVSFSDKPVDQIAVEEKLQKLQELENRLSLQDGTLKKILALAKSVKQNTSSVGQKIIKDDIKSLQCKQKDLENRLASAKQEMECCLNSILKSKRSTEKKGKFTLPGREKQATSDVQESTQESAAVEKLEEDWEINKDSAVEMAMSKQLSLNAQESMKNTEDERKVNELQNQPLELDTMLRNEQLEEIEKLYTQLEAKKAAIKPLEQTECLNKTETGALVLHNIGYSAQHLDNLLQALITLKKNKESQYCVLRDFQEYLAAVESSMKALLTDKESLKVGPLDSVTYLDKIKKFIASIEKEKDSLGNLKIKWENLSNHVTDMDKKLLESQIKQLEHGWEQVEQQIQKKYSQQVVEYDEFTTLMNKVQDTEISLQQQQQHLQLRLKSPEERAGNQSMIALTTDLQATKHGFSVLKGQAELQMKRIWGEKEKKNLEDGINNLKKQWETLEPLHLEAENQIKKCDIRNKMKETILWAKNLLGELNPSIPLLPDDILSQIRKCKVTHDGILARQQSVESLAEEVKDKVPSLTTYEGSDLNNTLEDLRNQYQMLVLKSTQRSQQLEFKLEERSNFFAIIRKFQLMVQESETLIIPRVETAATEAELKHHHVTLEASQKELQEIDSGISTHLQELTNIYEELNVFERLFLEDQLKNLKIRTNRIQRFIQNTCNEVEHKIKFCRQFHEKTSALQEEADSIQRNELLLNQEVNKGVKEEIYNLKDRLTAIKCCILQVLKLKKVFDYIGLNWDFSQLDQLQTQVFEKEKELEEKIKQLDTFEEEHGKYQALLSKMRAIDLQIKKMTEVVLKAPDSSPESRRLNAQILSQRIEKAKCLCDEIIKKLNENKTFDDSFKEKEILQIKLNAEENDKLYKVLQNMVLELSPKELDEKNCQDKLETSLHVLNQIKSQLQQPLLINLEIKHIQNEKDNCEAFQEQVWAEMCSIKAVTAIEKQREENSSEASDVETKLREFEDLQMQLNTSIDLRTNVLNDAYENLTRYKEAVTRAVESITSLEAIIIPYRVDVGNPEESLEMPLRKQEELESTVAHIQDLTEKLGMISSPEAKLQLQYTLQELVSKNSAMKEAFKAQETEAERYLENYKCYRKMEEDIYTNLSKMETVLGQSMSSLPLSYREALERLEQSKALVSNLISTKEELMKLRQILRLLRLRCTENDGICLLKIVSALWEKWLSLLEAAKEWEMWCEELKQEWKFVSEEIEREAIILDNLQEELPEISKTKEAATTEELSELLDCLCQYGENVEKQQLLLTLLLQRIRSIQNVPESSGAVETVPAFQEITSMKERCNKLLQKVQKNKELVQTEIQERHSFTKEIIALKNFFQQTTTSFQNMAFQDHPEKSEQFEELQSILKKGKLTFENIMEKLRIKYSEMYTIVPAEIESQVEECRKALEDIDEKISNEVLKSSPSYAMRRKIEEINNGLHNVEKMLQQKSKNIEKAQEIQKKMWDELDLWHSKLNELDSEVQDIVEQDPGQAQEWMDNLMIPFQQYQQVSQRAECRTSQLNKATVKMEEYSDLLKSTEAWIENTSHLLANPADYDSLRTLSHHASTVQMALEDSEQKHNLLHSIFMDLEDLSIIFETDELTQSIQELSNQVTALQQKIMESLPQIQRMADDVVAIESEVKSMEKRVSKIKTILLSKEIFDFSPEEHLKHGEVILENIRPMKKTIAEIVSYQVELRLPQTGMKPLPVFQRTNQLLQDIKLLENVTQEQNELLKVVIKQTNEWDEEIENLKQILNNYSAQFSLEHMSPDQADKLPQLQGEIERMEKQILSLNQRKEDLLVDLKATVLNLHQHLKQEQEGVERDRLPAVTSEEGGVAERDASERKLNRRGSMSYLAAVEEEVEESSVKSDNGDEKAEPSPQSWSSLWKHDKDMEEDRASSSSGTIVQEAYGKISTSDNSMAQILTPDSLNTEQGPECSLRPNQTEEGTTPPIEADTLDSSDAQGGLEPRVEKTRPEPTEVLHACKTQVAELELWLQQANVAVEPETLNADMQQVLEQQLVGCQAMLTEIEHKVAFLLETCKDQGLGDNGATQHEAEALSLKLKTVKCNLEKVQMMLQEKHSEDQHPTILKKSSEPEHQEALQPVNLSELESIVTERPQFSRQKDFQQQQVLELKPMEQKDFIKFIEFNAKKMWPQYCQHDNDTTQESSASNQASSPENDVPDSILSPQGQNGDKWQYLHHELSSKIKLPLPQLVEPQVSTNMGILPSVTMYNFRYPTTEELKTYTTQLEDLRQEASNLQTQENMTEEAYINLDKKLFELFLTLSQCLSSVEEMLEMPRLYREDGSGQQVHYETLALELKKLYLALSDKKGDLLKAMTWPGENTNLLLECFDNLQVCLEHTQAAAVCRSKSLKAGLDYNRSYQNEIKRLYHQLIKSKTSLQQSLNEISGQSVAEQLQKADAYTVELENAESRVAKLRDEGERLHLPYALLQEVYKLEDVLDSMWGMLRARYTELSSPFVTESQQDALLQGMVELVKIGKEKLAHGHLKQTKSKVALQAQIENHKVFFQKLVADMLLIQAYSAKILPSLLQNRETFWAEQVTEVKILEEKSRQCGMKLQSLLQKWEEFDENYASLEKDLEILISTLPSVSLVEETEERLVERISFYQQIKRNIGGKHARLYQTLNEGKQLVASVSCPELEGQIAKLEEQWLSLNKKIDHELHRLQALLKHLLSYNRDSDQLTKWLESSQHTLNYWKEQSLNVSQDLDTIRSNINNFFEFSKEVDEKSSLKTAVISIGNQLLHLKETDTATLRASLAQFEQKWTMLITQLPDIQEKLHQLQMEKLPSRKAITEMISWMNNVEHQTSDEDSVHSPSSASQVKHLLQKHKEFRMEMDYKQWIVDFVNQSLLQLSTCDVESKRYERTEFAEHLGEMNRQWHRVHGMLNRKIQHLEQLLESITESENKIQILNNWLEAQEERLKTLQKPESVISVQKLLLDCQDIENQLAIKSKALDELKQSYLTLESGAVPLLEDTASRIDELFQKRSSVLTQVNQLKTSMQSVLQEWKIYDQLYDEVNMMTIRFWYCMEHSKPVVLSLETLRCQVENLQSLQDEAESSEGSWEKLQEVIGKLKGLCPSVAEIIEEKCQNTHKRWTQVNQAIADQLQKAQSLLQLWKAYSNAHGEAAARLKQQEAKFQQLANISMSGNNLAEILPPALQDIKELQHDVQKTKEAFLQNSSVLDRLPQPAESSTHMLLPGPLHSLQRAAYLEKMLLVKANEFEFVLSQFKDFGVRLESLKGLIMHEEENLDRLHQQEKENPDSFLNHVLALTAQSPDIEHLNEVSLKLPLSDVAVKTLQNMNRQWIRATATALERCSELQGIGLNEKFLYCCEKWIQLLEKIEEALKVDVANSLPELLEQQKTYKMLEAEVSINQTIADSYVTQSLQLLDTTEIENRPEFITEFSKLTDRWQNAVQGVRQRKGDVDGLVRQWQDFTTSVENLFRFLTDTSHLLSAVKGQERFSLYQTRSLIHELKNKEIHFQRRRTTCALTLEAGEKLLLTTDLKTKESVGRRISQLQDSWKDMEPQLAEMIKQFQSTVETWDQCEKKIKELKSRLQVLKAQSEDPLPELHEDLHNEKELIKELEQSLASWTQNLKELQTMKADLTRHVLVEDVMVLKEQIEHLHRQWEDLCLRVAIRKQEIEDRLNTWVVFNEKNKELCAWLVQMENKVLQTADISIEEMIEKLQKDCMEEINLFSENKLQLKQMGDQLIKASNKSRAAEIDDKLNKINDRWQHLFDVIGSRVKKLKETFAFIQQLDKNMSNLRTWLARIESELSKPVVYDVCDDQEIQKRLAEQQDLQRDIEQHSAGVESVFNICDVLLHDSDACANETECDSIQQTTRSLDRRWRNICAMSMERRMKIEETWRLWQKFLDDYSRFEDWLKSAERTAACPNSSEVLYTSAKEELKRFEAFQRQIHERLTQLELINKQYRRLARENRTDTASRLKQMVHEGNQRWDNLQRRVTAVLRRLRHFTNQREEFEGTRESILVWLTEMDLQLTNVEHFSESDADDKMRQLNGFQQEITLNTNKIDQLIVFGEQLIQKSEPLDAVLIEDELEELHRYCQEVFGRVSRFHRRLTSCTPGLEDEKEASENETDMEDPREIQTDSWRKRGESEEPSSPQSLCHLVAPGHERSGCETPVSVDSIPLEWDHTGDVGGSSSHEEDEEGPYYSALSGKSISDGHSWHVPDSPSCPEHHYKQMEGDRNVPPVPPASSTPYKPPYGKLLLPPGTDGGKEGPRVLNGNPQQEDGGLAGITEQQSGAFDRWEMIQAQELHNKLKIKQNLQQLNSDISAITTWLKKTEAELEMLKMAKPPSDIQEIELRVKRLQEILKAFDTYKALVVSVNVSSKEFLQTESPESTELQSRLRQLSLLWEAAQGAVDSWRGGLRQSLMQCQDFHQLSQNLLLWLASAKNRRQKAHVTDPKADPRALLECRRELMQLEKELVERQPQVDMLQEISNSLLIKGHGEDCIEAEEKVHVIEKKLKQLREQVSQDLMALQGTQNPASPLPSFDEVDSGDQPPATSVPAPRAKQFRAVRTTEGEEETESRVPGSTRPQRSFLSRVVRAALPLQLLLLLLLLLACLLPSSEEDYSCTQANNFARSFYPMLRYTNGPPPT

SEQ ID NO: 646 - protein, 5038 aa, Homo sapiens
MGDAEGEDEVQFLRTDDEVVLQCSATVLKEQLKLCLAAEGFGNRLCFLEPTSNAQNVPPDLAICCFVLEQSLSVRALQEMLANTVEAGVESSQGGGHRTLLYGHAILLRHAHSRMYLSCLTTSRSMTDKLAFDVGLQEDATGEACWWTMHPASKQRSEGEKVRVGDDIILVSVSSERYLHLSTASGELQVDASFMQTLWNMNPICSRCEEGFVTGGHVLRLFHGHMDECLTISPADSDDQRRLVYYEGGAVCTHARSLWRLEPLRISWSGSHLRWGQPLRVRHVTTGQYLALTEDQGLVVVDASKAHTKATSFCFRISKEKLDVAPKRDVEGMGPPEIKYGESLCFVQHVASGLWLTYAAPDPKALRLGVLKKKAMLHQEGHMDDALSLTRCQQEESQAARMIHSTNGLYNQFIKSLDSFSGKPRGSGPPAGTALPIEGVILSLQDLIIYFEPPSEDLQHEEKQSKLRSLRNRQSLFQEEGMLSMVLNCIDRLNVYTTAAHFAEFAGEEAAESWKEIVNLLYELLASLIRGNRSNCALFSTNLDWLVSKLDRLEASSGILEVLYCVLIESPEVLNIIQENHIKSIISLLDKHGRNHKVLDVLCSLCVCNGVAVRSNQDLITENLLPGRELLLQTNLINYVTSIRPNIFVGRAEGTTQYSKWYFEVMVDEVTPFLTAQATHLRVGWALTEGYTPYPGAGEGWGGNGVGDDLYSYGFDGLHLWTGHVARPVTSPGQHLLAPEDVISCCLDLSVPSISFRINGCPVQGVFESFNLDGLFFPVVSFSAGVKVRFLLGGRHGEFKFLPPPGYAPCHEAVLPRERLHLEPIKEYRREGPRGPHLVGPSRCLSHTDFVPCPVDTVQIVLPPHLERIREKLAENIHELWALTRIEQGWTYGPVRDDNKRLHPCLVDFHSLPEPERNYNLQMSGETLKTLLALGCHVGMADEKAEDNLKKTKLPKTYMMSNGYKPAPLDLSHVRLTPAQTTLVDRLAENGHNVWARDRVGQGWSYSAVQDIPARRNPRLVPYRLLDEATKRSNRDSLCQAVRTLLGYGYNIEPPDQEPSQVENQSRCDRVRIFRAEKSYTVQSGRWYFEFEAVTTGEMRVGWARPELRPDVELGADELAYVFNGHRGQRWHLGSEPFGRPWQPGDVVGCMIDLTENTIIFTLNGEVLMSDSGSETAFREIEIGDGFLPVCSLGPGQVGHLNLGQDVSSLRFFAICGLQEGFEPFAINMQRPVTTWFSKGLPQFEPVPLEHPHYEVSRVDGTVDTPPCLRLTHRTWGSQNSLVEMLFLRLSLPVQFHQHFRCTAGATPLAPPGLQPPAEDEARAAEPDPDYENLRRSAGGWSEAENGKEGTAKEGAPGGTPQAGGEAQPARAENEKDATTEKNKKRGFLFKAKKVAMMTQPPATPTLPRLPHDVVPADNRDDPEIILNTTTYYYSVRVFAGQEPSCVWAGWVTPDYHQHDMSFDLSKVRVVTVTMGDEQGNVHSSLKCSNCYMVWGGDFVSPGQQGRISHTDLVIGCLVDLATGLMTFTANGKESNTFFQVEPNTKLFPAVFVLPTHQNVIQFELGKQKNIMPLSAAMFQSERKNPAPQCPPRLEMQMLMPVSWSRMPNHFLQVETRRAGERLGWAVQCQEPLTMMALHIPEENRCMDILELSERLDLQRFHSHTLRLYRAVCALGNNRVAHALCSHVDQAQLLHALEDAHLPGPLRAGYYDLLISIHLESACRSRRSMLSEYIVPLTPETRAITLFPPGRSTENGHPRHGLPGVGVTTSLRPPHHFSPPCFVAALPAAGAAEAPARLSPAIPLEALRDKALRMLGEAVRDGGQHARDPVGGSVEFQFVPVLKLVSTLLVMGIFGDEDVKQILKMIEPEVFTEEEEEEDEEEEGEEEDEEEKEEDEEETAQEKEDEEKEEEEAAEGEKEEGLEEGLLQMKLPESVKLQMCHLLEYFCDQELQHRVESLAAFAERYVDKLQANQRSRYGLLIKAFSMTAAETARRTREFRSPPQEQINMLLQFKDGTDEEDCPLPEEIRQDLLDFHQDLLAHCGIQLDGEEEEPEEETTLGSRLMSLLEKVRLVKKKEEKPEEERSAEESKPRSLQELVSHMVVRWAQEDFVQSPELVRAMFSLLHRQYDGLGELLRALPRAYTISPSSVEDTMSLLECLGQIRSLLIVQMGPQEENLMIQSIGNIMNNKVFYQHPNLMRALGMHETVMEVMVNVLGGGESKEIRFPKMVTSCCRFLCYFCRISRQNQRSMFDHLSYLLENSGIGLGMQGSTPLDVAAASVIDNNELALALQEQDLEKVVSYLAGCGLQSCPMLVAKGYPDIGWNPCGGERYLDFLRFAVFVNGESVEENANVVVRLLIRKPECFGPALRGEGGSGLLAAIEEAIRISEDPARDGPGIRRDRRREHFGEEPPEENRVHLGHAIMSFYAALIDLLGRCAPEMHLIQAGKGEALRIRAILRSLVPLEDLVGIISLPLQIPTLGKDGALVQPKMSASFVPDHKASMVLFLDRVYGIENQDFLLHVLDVGFLPDMRAAASLDTATFSTTEMALALNRYLCLAVLPLITKCAPLFAGTEHRAIMVDSMLHTVYRLSRGRSLTKAQRDVIEDCLMSLCRYIRPSMLQHLLRRLVFDVPILNEFAKMPLKLLTNHYERCWKYYCLPTGWANFGVTSEEELHLTRKLFWGIFDSLAHKKYDPELYRMAMPCLCAIAGALPPDYVDASYSSKAEKKATVDAEGNFDPRPVETLNVIIPEKLDSFINKFAEYTHEKWAFDKIQNNWSYGENIDEELKTHPMLRPYKTFSEKDKEIYRWPIKESLKAMIAWEWTIEKAREGEEEKTEKKKTRKISQSAQTYDPREGYNPQPPDLSAVTLSRELQAMAEQLAENYHNTWGRKKKQELEAKGGGTHPLLVPYDTLTAKEKARDREKAQELLKFLQMNGYAVTRGLKDMELDSSSIEKRFAFGFLQQLLRWMDISQEFIAHLEAVVSSGRVEKSPHEQEIKFFAKILLPLINQYFTNHCLYFLSTPAKVLGSGGHASNKEKEMITSLFCKLAALVRHRVSLFGTDAPAVVNCLHILARSLDARTVMKSGPEIVKAGLRSFFESASEDIEKMVENLRLGKVSQARTQVKGVGQNLTYTTVALLPVLTTLFQHIAQHQFGDDVILDDVQVSCYRTLCSIYSLGTTKNTYVEKLRPALGECLARLAAAMPVAFLEPQLNEYNACSVYTTKSPRERAILGLPNSVEEMCPDIPVLERLMADIGGLAESGARYTEMPHVIEITLPMLCSYLPRWWERGPEAPPSALPAGAPPPCTAVTSDHLNSLLGNILRIIVNNLGIDEASWMKRLAVFAQPIVSRARPELLQSHFIPTIGRLRKRAGKVVSEEEQLRLEAKAEAQEGELLVRDEFSVLCRDLYALYPLLIRYVDNNRAQWLTEPNPSAEELFRMVGEIFIYWSKSHNFKREEQNFVVQNEINNMSFLTADNKSKMAKAGDIQSGGSDQERTKKKRRGDRYSVQTSLIVATLKKMLPIGLNMCAPTDQDLITLAKTRYALKDTDEEVREFLHNNLHLQGKVEGSPSLRWQMALYRGVPGREEDADDPEKIVRRVQEVSAVLYYLDQTEHPYKSKKAVWHKLLSKQRRRAVVACFRMTPLYNLPTHRACNMFLESYKAAWILTEDHSFEDRMIDDLSKAGEQEEEEEEVEEKKPDPLHQLVLHFSRTALTEKSKLDEDYLYMAYADIMAKSCHLEEGGENGEAEEEVEVSFEEKQMEKQRLLYQQARLHTRGAAEMVLQMISACKGETGAMVSSTLKLGISILNGGNAEVQQKMLDYLKDKKEVGFFQSIQALMQTCSVLDLNAFERQNKAEGLGMVNEDGTVINRQNGEKVMADDEFTQDLFRFLQLLCEGHNNDFQNYLRTQTGNTTTINIIICTVDYLLRLQESISDFYWYYSGKDVIEEQGKRNFSKAMSVAKQVFNSLTEYIQGPCTGNQQSLAHSRLWDAVVGFLHVFAHMMMKLAQDSSQIELLKELLDLQKDMVVMLLSLLEGNVVNGMIARQMVDMLVESSSNVEMILKFFDMFLKLKDIVGSEAFQDYVTDPRGLISKKDFQKAMDSQKQFSGPEIQFLLSCSEADENEMINCEEFANRFQEPARDIGFNVAVLLTNLSEHVPHDPRLHNFLELAESILEYFRPYLGRIEIMGASRRIERIYFEISETNRAQWEMPQVKESKRQFIFDVVNEGGEAEKMELFVSFCEDTIFEMQIAAQISEPEGEPETDEDEGAGAAEAGAEGAEEGAAGLEGTAATAAAGATARVVAAAGRALRGLSYRSLRRRVRRLRRLTAREAATAVAALLWAAVTRAGAAGAGAAAGALGLLWGSLFGGGLVEGAKKVTVTELLAGMPDPTSDEVHGEQPAGPGGDADGEGASEGAGDAAEGAGDEEEAVHEAGPGGADGAVAVTDGGPFRPEGAGGLGDMGDTTPAEPPTPEGSPILKRKLGVDGVEEELPPEPEPEPEPELEPEKADAENGEKEEVPEPTPEPPKKQAPPSPPPKKEEAGGEFWGELEVQRVKFLNYLSRNFYTLRFLALFLAFAINFILLFYKVSDSPPGEDDMEGSAAGDVSGAGSGGSSGWGLGAGEEAEGDEDENMVYYFLEESTGYMEPALRCLSLLHTLVAFLCIIGYNCLKVPLVIFKREKELARKLEFDGLYITEQPEDDDVKGQWDRLVLNTPSFPSNYWDKFVKRKVLDKHGDIYGRERIAELLGMDLATLEITAHNERKPNPPPGLLTWLMSIDVKYQIWKFGVIFTDNSFLYLGWYMVMSLLGHYNNFFFAAHLLDIAMGVKTLRTILSSVTHNGKQLVMTVGLLAVVVYLYTVVAFNFFRKFYNKSEDEDEPDMKCDDMMTCYLFHMYVGVRAGGGIGDEIEDPAGDEYELYRVVFDITFFFFVIVILLAIIQGLIIDAFGELRDQQEQVKEDMETKCFICGIGSDYFDTTPHGFETHTLEEHNLANYMFFLMYLINKDETEHTGQESYVWKMYQERCWDFFPAGDCFRKQYEDQLS

SEQ ID NO: 647 - protein, 108 aa, Homo sapiens
DIQMTZSPSSLSASVGBRVTITCRASZTISSYLBWYZZKPGKAPBLLIYAASBLHSGVPSRFSGSGSGTBFTFTISSLZPZBFATYYCZZSYSSPTTFGZGTRLZIKR

SEQ ID NO: 648 - protein, 127 aa, Homo sapiens
MSFSGKYQLQSQENFEAFMKAIGLPEELIQKGKDIKGVSEIVQNGKHFKFTITAGSKVIQNEFTVGEECELETMTGEKVKTVVQLEGDNKLVTTFKNIKSVTELNGDIITNTMTLGDIVFKRISKRI

SEQ ID NO: 649 - protein, 108 aa, Homo sapiens
BIZMTQSPSSLSASVGDRVTITCRAGQSVNKYLNWYQQKPGKAPKVLIFAASSLKSGVPSRFSGSGSGTDFTLTISGLLPEDFATYYCQQSYTTPYTFGPGTKVEMTR

SEQ ID NO: 650 - protein, 8749 aa, Homo sapiens
MATSRGASRCPRDIANVMQRLQDEQEIVQKRTFTKWINSHLAKRKPPMVVDDLFEDMKDGVKLLALLEVLSGQKLPCEQGRRMKRIHAVANIGTALKFLEGRKSMHRGSPIKLVNINSTDIADGRPSIVLGLMWTIILYFQIEELTSNLPQLQSLSSSASSVDSIVSSETPSPPSKRKVTTKIQGNAKKALLKWVQYTAGKQTGIEVKDFGKSWRSGVAFHSVIHAIRPELVDLETVKGRSNRENLEDAFTIAETELGIPRLLDPEDVDVDKPDEKSIMTYVAQFLKHYPDIHNASTDGQEDDEILPGFPSFANSVQNFKREDRVIFKEMKVWIEQFERDLTRAQMVESNLQDKYQSFKHFRVQYEMKRKQIEHLIQPLHRDGKLSLDQALVKQSWDRVTSRLFDWHIQLDKSLPAPLGTIGAWLYRAEVALREEITVQQVHEETANTIQRKLEQHKDLLQNTDAHKRAFHEIYRTRSVNGIPVPPDQLEDMAERFHFVSSTSELHLMKMEFLELKYRLLSLLVLAESKLKSWIIKYGRRESVEQLLQNYVSFIENSKFFEQYEVTYQILKQTAEMYVKADGSVEEAENVMKFMNETTAQWRNLSVEVRSVRSMLEEVISNWDRYGNTVASLQAWLEDAEKMLNQSENAKKDFFRNLPHWIQQHTAMNDAGNFLIETCDEMVSRDLKQQLLLLNGRWRELFMEVKQYAQADEMDRMKKEYTDCVVTLSAFATEAHKKLSEPLEVSFMNVKLLIQDLEDIEQRVPVMDAQYKIITKTAHLITKESPQEEGKEMFATMSKLKEQLTKVKECYSPLLYESQQLLIPLEELEKQMTSFYDSLGKINEIITVLEREAQSSALFKQKHQELLACQENCKKTLTLIEKGSQSVQKFVTLSNVLKHFDQTRLQRQIADIHVAFQSMVKKTGDWKKHVETNSRLMKKFEESRAELEKVLRIAQEGLEEKGDPEELLRRHTEFFSQLDQRVLNAFLKACDELTDILPEQEQQGLQEAVRKLHKQWKDLQGEAPYHLLHLKIDVEKNRFLASVEECRTELDRETKLMPQEGSEKIIKEHRVFFSDKGPHHLCEKRLQLIEELCVKLPVRDPVRDTPGTCHVTLKELRAAIDSTYRKLMEDPDKWKDYTSRFSEFSSWISTNETQLKGIKGEAIDTANHGEVKRAVEEIRNGVTKRGETLSWLKSRLKVLTEVSSENEAQKQGDELAKLSSSFKALVTLLSEVEKMLSNFGDCVQYKEIVKNSLEELISGSKEVQEQAEKILDTENLFEAQQLLLHHQQKTKRISAKKRDVQQQIAQAQQGEGGLPDRGHEELRKLESTLDGLERSRERQERRIQVTLRKWERFETNKETVVRYLFQTGSSHERFLSFSSLESLSSELEQTKEFSKRTESIAVQAENLVKEASEIPLGPQNKQLLQQQAKSIKEQVKKLEDTLEEDIKTMEMVKTKWDHFGSNFETLSVWITEKEKELNALETSSSAMDMQISQIKVTIQEIESKLSSIVGLEEEAQSFAQFVTTGESARIKAKLTQIRRYGEELREHAQCLEGTILGHLSQQQKFEENLRKIQQSVSEFEDKLAVPIKICSSATETYKVLQEHMDLCQALESLSSAITAFSASARKVVNRDSCVQEAAALQQQYEDILRRAKERQTALENLLAHWQRLEKELSSFLTWLERGEAKASSPEMDISADRVKVEGELQLIQALQNEVVSQASFYSKLLQLKESLFSVASKDDVKMMKLHLEQLDERWRDLPQIINKRINFLQSVVAEHQQFDELLLSFSVWIKLFLSELQTTSEISIMDHQVALTRHKDHAAEVESKKGELQSLQGHLAKLGSLGRAEDLHLLQGKAEDCFQLFEEASQVVERRQLALSHLAEFLQSHASLSGILRQLRQTVEATNSMNKNESDLIEKDLNDALQNAKALESAAVSLDGILSKAQYHLKIGSSEQRTSCRATADQLCGEVERIQNLLGTKQSEADALAVLKKAFQDQKEELLKSIEDIEERTDKERLKEPTRQALQQRLRVFNQLEDELNSHEHELCWLKDKAKQIAQKDVAFAPEVDREINRLEVTWDDTKRLIHENQGQCCGLIDLMREYQNLKSAVSKVLENASSVIVTRTTIKDQEDLKWAFSKHETAKNKMNYKQKDLDNFTSKGKHLLSELKKIHSSDFSLVKTDMESTVDKWLDVSEKLEENMDRLRVSLSIWDDVLSTRDEIEGWSNNCVPQMAENISNLDNHLRAEELLKEFESEVKNKALRLEELHSKVNDLKELTKNLETPPDLQFIEADLMQKLEHAKEITEVAKGTLKDFTAQSTQVEKFINDITTWFTKVEESLMNCAQNETCEALKKVKDIQKELQSQQSNISSTQENLNSLCRKYHSAELESLGRAMTGLIKKHEAVSQLCSKTQASLQESLEKHFSESMQEFQEWFLGAKAAAKESSDRTGDSKVLEAKLHDLQNILDSVSDGQSKLDAVTQEGQTLYAHLSKQIVSSIQEQITKANEEFQAFLKQCLKDKQALQDCASELGSFEDQHRKLNLWIHEMEERFNTENLGESKQHIPEKKNEVHKVEMFLGELLAARESLDKLSQRGQLLSEEGHGAGQEGRLCSQLLTSHQNLLRMTKEKLRSCQVALQEHEALEEALQSMWFWVKAIQDRLACAESTLGSKDTLEKRLSQIQDILLMKGEGEVKLNMAIGKGEQALRSSNKEGQRVIQTQLETLKEVWADIMSSSVHAQSTLESVISQWNDYVERKNQLEQWMESVDQKIEHPLQPQPGLKEKFVLLDHLQSILSEAEDHTRALHRLIAKSRELYEKTEDESFKDTAQEELKTQFNDIMTVAKEKMRKVEEIVKDHLMYLDAVHEFTDWLHSAKEELHRWSDMSGDSSATQKKLSKIKELIDSREIGASRLSRVESLAPEVKQNTTASGCELMHTEMQALRADWKQWEDSVFQTQSCLENLVSQMALSEQEFSGQVAQLEQALEQFSALLKTWAQQLTLLEGKNTDEEIVECWHKGQEILDALQKAEPRTEDLKSQLNELCRFSRDLSTYSGKVSGLIKEYNCLCLQASKGCQNKEQILQQRFRKAFRDFQQWLVNAKITTAKCFDIPQNISEVSTSLQKIQEFLSESENGQHKLNMMLSKGELLSTLLTKEKAKGIQAKVTAAKEDWKNFHSNLHQKESALENLKIQMKDFEVSAEPIQDWLSKTEKMVHESSNRLYDLPAKRREQQKLQSVLEEIHCYEPQLNRLKEKAQQLWEGQAASKSFRHRVSQLSSQYLALSNLTKEKVSRLDRIVAEHNQFSLGIKELQDWMTDAIHMLDSYCHPTSDKSVLDSRTLKLEALLSVKQEKEIQMKMIVTRGESVLQNTSPEGIPTIQQQLQSVKDMWASLLSAGIRCKSQLEGALSKWTSYQDGVRQFSGWMDSMEANLNESERQHAELRDKTTMLGKAKLLNEEVLSYSSLLETIEVKGAGMTEHYVTQLELQDLQERYRAIQERAKEAVTKSEKLVRLHQEYQRDLKAFEVWLGQEQEKLDQYSVLEGDAHTHETTLRDLQELQVHCAEGQALLNSVLHTREDVIPSGIPQAEDRALESLRQDWQAYQHRLSETRTQFNNVVNKLRLMEQKFQQVDEWLKTAEEKKWHEEVTAYRDEVEEVGARAQEILDESHVNSRMGCQATQLTSRYQALLLQVLEQIKFLEEEIQSLEESESSLSSYSDWYGSTHKNFKNVATKIDKVDTVMMGKKLKTLEVLLKDMEKGHSLLKSAREKGERAVKYLEEGEAERLRKEIHDHMEQLKELTSTVRKEHMTLEKGLHLAKEFSDKCKALTQWIAEYQEILHVPEEPKMELYEKKAQLSKYKSLQQTVLSHEPSVKSVREKGEALLELVQDVTLKDKIDQLQSDYQDLCSIGKAMMEEIAGFEDRLNNLQMKGDTLIGQCADHLQAKLKQNVHAHLQGTKDSYSAICSTAQRMYQSLEHELQKHVSRQDTLQQCQAWLSAVQPDLEPSPQPPLSRAEAIKQVKHFRALQEQARTYLDLLCSMCDLSNASVKTTAKDIQQTEQTIEQKLVQAQNLTQGWEEIKHLKSELWIYLQDADQQLQNMKRRHSELELNIAQNMVSQVKDFVKKLQSKQASVNTIIEKVNKLTKKEESPEHKEINHLNDQWLDLCRQSNNLCLQREEDLQRTRDYHDCMNVVEVFLEKFTTEWDNLARSDAESTAVHLEALKKLALALQERKYAIEDLKDQKQKMIEHLNLDDKELVKEQTSHLEQRWFQLEDLIKRKIQVSVTNLEELNVVQSRFQELMEWAEEQQPNIAEALKQSPPPDMAQNLLMDHLAICSELEAKQMLLKSLIKDADRVMADLGLNERQVIQKALSDAQSHVNCLSDLVGQRRKYLNKALSEKTQFLMAVFQATSQIQQHERKIMFREHICLLPDDVSKQVKTCKSAQASLKTYQNEVTGLWAQGRELMKEVTEQEKSEVLGKLQELQSVYDSVLQKCSHRLQELEKNLVSRKHFKEDFDKACHWLKQADIVTFPEINLMNESSELHTQLAKYQNILEQSPEYENLLLTLQRTGQTILPSLNEVDHSYLSEKLNALPRQFNVIVALAKDKFYKVQEAILARKEYASLIELTTQSLSELEAQFLRMSKVPTDLAVEEALSLQDGCRAILDEVAGLGEAVDELNQKKEGFRSTGQPWQPDKMLHLVTLYHRLKRQTEQRVSLLEDTTSAYQEHEKMCQQLERQLKSVKEEQSKVNEETLPAEEKLKMYHSLAGSLQDSGIVLKRVTIHLEDLAPHLDPLAYEKARHQIQSWQGELKLLTSAIGETVTECESRMVQSIDFQTEMSRSLDWLRRVKAELSGPVYLDLNLQDIQEEIRKIQIHQEEVQSSLRIMNALSHKEKEKFTKAKELISADLEHSLAELSELDGDIQEALRTRQATLTEIYSQCQRYYQVFQAANDWLEDAQELLQLAGNGLDVESAEENLKSHMEFFSTEDQFHSNLEELHSLVATLDPLIKPTGKEDLEQKVASLELRSQRMSRDSGAQVDLLQRCTAQWHDYQKAREEVIELMNDTEKKLSEFSLLKTSSSHEAEEKLSEHKALVSVVNSFHEKIVALEEKASQLEKTGNDASKATLSRSMTTVWQRWTRLRAVAQDQEKILEDAVDEWTGFNNKVKKATEMIDQLQDKLPGSSAEKASKAELLTLLEYHDTFVLELEQQQSALGMLRQQTLSMLQDGAAPTPGEEPPLMQEITAMQDRCLNMQEKVKTNGKLVKQELKDREMVETQINSVKCWVQETKEYLGNPTIEIDAQLEELQILLTEATNHRQNIEKMAEEQKEKYLGLYTILPSELSLQLAEVALDLKIRDQIQDKIKEVEQSKATSQELSRQIQKLAKDLTTILTKLKAKTDNVVQAKTDQKVLGEELDGCNSKLMELDAAVQKFLEQNGQLGKPLAKKIGKLTELHQQTIRQAENRLSKLNQAASHLEEYNEMLELILKWIEKAKVLAHGTIAWNSASQLREQYILHQTLLEESKEIDSELEAMTEKLQYLTSVYCTEKMSQQVAELGRETEELRQMIKIRLQNLQDAAKDMKKFEAELKKLQAALEQAQATLTSPEVGRLSLKEQLSHRQHLLSEMESLKPKVQAVQLCQSALRIPEDVVASLPLCHAALRLQEEASRLQHTAIQQCNIMQAAVVQYEQYEQEMKHLQQLIEGAHREIEDKPVATSNIQELQAQISRHEELAQKIKGYQEQIASLNSKCKMLTMKAKHATMLLTVTEVEGLAEGTEDLDGELLPTPSAHPSVVMMTAGRCHTLLSPVTEESGEEGTNSEISSPPACRSPSPVANTDASVNQDIAYYQALSAERLQTDAAKIHPSTSASQEFYEPGLEPSATAKLGDLQRSWETLKNVISEKQRTLYEALERQQKYQDSLQSISTKMEAIELKLSESPEPGRSPESQMAEHQALMDEILMLQDEINELQSSLAEELVSESCEADPAEQLALQSTLTVLAERMSTIRMKASGKRQLLEEKLNDQLEEQRQEQALQRYRCEADELDSWLLSTKATLDTALSPPKEPMDMEAQLMDCQNMLVEIEQKVVALSELSVHNENLLLEGKAHTKDEAEQLAGKLRRLKGSLLELQRALHDKQLNMQGTAQEKEESDVDLTATQSPGVQEWLAQARTTWTQQRQSSLQQQKELEQELAEQKSLLRSVASRGEEILIQHSAAETSGDAGEKPDVLSQELGMEGEKSSAEDQMRMKWESLHQEFSTKQKLLQNVLEQEQEQVLYSRPNRLLSGVPLYKGDVPTQDKSAVTSLLDGLNQAFEEVSSQSGGAKRQSIHLEQKLYDGVSATSTWLDDVEERLFVATALLPEETETCLFNQEILAKDIKEMSEEMDKNKNLFSQAFPENGDNRDVIEDTLGCLLGRLSLLDSVVNQRCHQMKERLQQILNFQNDLKVLFTSLADNKYIILQKLANVFEQPVAEQIEAIQQAEDGLKEFDAGIIELKRRGDKLQVEQPSMQELSKLQDMYDELMMIIGSRRSGLNQNLTLKSQYERALQDLADLLETGQEKMAGDQKIIVSSKEEIQQLLDKHKEYFQGLESHMILTETLFRKIISFAVQKETQFHTELMAQASAVLKRAHKRGVELEYILETWSHLDEDQQELSRQLEVVESSIPSVGLVEENEDRLIDRITLYQHLKSSLNEYQPKLYQVLDDGKRLLISISCSDLESQLNQLGECWLSNTNKMSKELHRLETILKHWTRYQSESADLIHWLQSAKDRLEFWTQQSVTVPQELEMVRDHLNAFLEFSKEVDAQSSLKSSVLSTGNQLLRLKKVDTATLRSELSRIDSQWTDLLTNIPAVQEKLHQLQMDKLPSRHAISEVMSWISLMENVIQKDEDNIKNSIGYKAIHEYLQKYKGFKIDINCKQLTVDFVNQSVLQISSQDVESKRSDKTDFAEQLGAMNKSWQILQGLVTEKIQLLEGLLESWSEYENNVQCLKTWFETQEKRLKQQHRIGDQASVQNALKDCQDLEDLIKAKEKEVEKIEQNGLALIQNKKEDVSSIVMSTLRELGQTWANLDHMVGQLKILLKSVLDQWSSHKVAFDKINSYLMEARYSLSRFRLLTGSLEAVQVQVDNLQNLQDDLEKQERSLQKFGSITNQLLKECHPPVTETLTNTLKEVNMRWNNLLEEIAEQLQSSKALLQLWQRYKDYSKQCASTVQQQEDRTNELLKAATNKDIADDEVATWIQDCNDLLKGLGTVKDSLFFLHELGEQLKQQVDASAASAIQSDQLSLSQHLCALEQALCKQQTSLQAGVLDYETFAKSLEALEAWIVEAEEILQGQDPSHSSDLSTIQERMEELKGQMLKFSSMAPDLDRLNELGYRLPLNDKEIKRMQNLNRHWSLISSQTTERFSKLQSFLLQHQTFLEKCETWMEFLVQTEQKLAVEISGNYQHLLEQQRAHELFQAEMFSRQQILHSIIIDGQRLLEQGQVDDRDEFNLKLTLLSNQWQGVIRRAQQRRGIIDSQIRQWQRYREMAEKLRKWLVEVSYLPMSGLGSVPIPLQQARTLFDEVQFKEKVFLRQQGSYILTVEAGKQLLLSADSGAEAALQAELAEIQEKWKSASMRLEEQKKKLAFLLKDWEKCEKGIADSLEKLRTFKKKLSQSLPDHHEELHAEQMRCKELENAVGSWTDDLTQLSLLKDTLSAYISADDISILNERVELLQRQWEELCHQLSLRRQQIGERLNEWAVFSEKNKELCEWLTQMESKVSQNGDILIEEMIEKLKKDYQEEIAIAQENKIQLQQMGERLAKASHESKASEIEYKLGKVNDRWQHLLDLIAARVKKLKETLVAVQQLDKNMSSLRTWLAHIESELAKPIVYDSCNSEEIQRKLNEQQELQRDIEKHSTGVASVLNLCEVLLHDCDACATDAECDSIQQATRNLDRRWRNICAMSMERRLKIEETWRLWQKFLDDYSRFEDWLKSSERTAAFPSSSGVIYTVAKEELKKFEAFQRQVHECLTQLELINKQYRRLARENRTDSACSLKQMVHEGNQRWDNLQKRVTSILRRLKHFIGQREEFETARDSILVWLTEMDLQLTNIEHFSECDVQAKIKQLKAFQQEISLNHNKIEQIIAQGEQLIEKSEPLDAAIIEEELDELRRYCQEVFGRVERYHKKLIRLPLPDDEHDLSDRELELEDSAALSDLHWHDRSADSLLSPQPSSNLSLSLAQPLRSERSGRDTPASVDSIPLEWDHDYDLSRDLESAMSRALPSEDEEGQDDKDFYLRGAVGLSDVMIPESPEAYVKLTENAIKNTSGDHSALESQIRQLGKALDDSRFQIQQTENIIRSKTPTGPELDTSYKGYMKLLGECSSSIDSVKRLEHKLKEEEESLPGFVNLHSTETQTAGVIDRWELLQAQALSKELRMKQNLQKWQQFNSDLNSIWAWLGDTEEELEQLQRLELSTDIQTIELQIKKLKELQKAVDHRKAIILSINLCSPEFTQADSKESRDLQDRLSQMNGRWDRVCSLLEEWRGLLQDALMQCQGFHEMSHGLLLMLENIDRRKNEIVPIDSNLDAEILQDHHKQLMQIKHELLESQLRVASLQDMSCQLLVNAEGTDCLEAKEKVHVIGNRLKLLLKEVSRHIKELEKLLDVSSSQQDLSSWSSADELDTSGSVSPTSGRSTPNRQKTPRGKCSLSQPGPSVSSPHSRSTKGGSDSSLSEPGPGRSGRGFLFRVLRAALPLQLLLLLLIGLACLVPMSEEDYSCALSNNFARSFHPMLRYTNGPPPL

SEQ ID NO: 651 - protein, 176 aa, Homo sapiens
MKPLLLAVSLGLIAALQAHHLLASDEEIQDVSGTWYLKAMTVDREFPEMNLESVTPMTLTTLEGGNLEAKVTMLISGRCQEVKAVLEKTDEPGKYTADGGKHVAYIIRSHVKDHYIFYCEGELHGKPVRGVKLVGRDPKNNLEALEDFEKAAGARGLSTESILIPRQSETCSPGSD

SEQ ID NO: 652 - protein, 6620 aa, Homo sapiens
MDQPQFSGAPRFLTRPKAFVVSVGKDATLSCQIVGNPTPQVSWEKDQQPVAAGARFRLAQDGDLYRLTILDLALGDSGQYVCRARNAIGEAFAAVGLQVDAEAACAEQAPHFLLRPTSIRVREGSEATFRCRVGGSPRPAVSWSKDGRRLGEPDGPRVRVEELGEASALRIRAARPRDGGTYEVRAENPLGAASAAAALVVDSDAADTASRPGTSTAALLAHLQRRREAMRAEGAPASPPSTGTRTCTVTEGKHARLSCYVTGEPKPETVWKKDGQLVTEGRRHVVYEDAQENFVLKILFCKQSDRGLYTCTASNLVGQTYSSVLVVVREPAVPFKKRLQDLEVREKESATFLCEVPQPSTEAAWFKEETRLWASAKYGIEEEGTERRLTVRNVSADDDAVYICETPEGSRTVAELAVQGNLLRKLPRKTAVRVGDTAMFCVELAVPVGPVHWLRNQEEVVAGGRVAISAEGTRHTLTISQCCLEDVGQVAFMAGDCQTSTQFCVSAPRKPPLQPPVDPVVKARMESSVILSWSPPPHGERPVTIDGYLVEKKKLGTYTWIRCHEAEWVATPELTVADVAEEGNFQFRVSALNSFGQSPYLEFPGTVHLAPKLAVRTPLKAVQAVEGGEVTFSVDLTVASAGEWFLDGQALKASSVYEIHCDRTRHTLTIREVPASLHGAQLKFVANGIESSIRMEVRAAPGLTANKPPAAAAREVLARLHEEAQLLAELSDQAAAVTWLKDGRTLSPGPKYEVQASAGRRVLLVRDVARDDAGLYECVSRGGRIAYQLSVQGLARFLHKDMAGSCVDAVAGGPAQFECETSEAHVHVHWYKDGMELGHSGERFLQEDVGTRHRLVAATVTRQDEGTYSCRVGEDSVDFRLRVSEPKVVFAKEQLARRKLQAEAGASATLSCEVAQAQTEVTWYKDGKKLSSSSKVCMEATGCTRRLVVQQAGQADAGEYSCEAGGQRLSFHLDVKEPKVVFAKDQVAHSEVQAEAGASATLSCEVAQAQTEVMWYKDGKKLSSSLKVHVEAKGCRRRLVVQQAGKTDAGDYSCEARGQRVSFRLHITEPKMMFAKEQSVHNEVQAEAGASAMLSCEVAQAQTEVTWYKDGKKLSSSSKVGMEVKGCTRRLVLPQAGKADAGEYSCEAGGQRVSFHLHITEPKGVFAKEQSVHNEVQAEAGTTAMLSCEVAQPQTEVTWYKDGKKLSSSSKVRMEVKGCTRRLVVQQVGKADAGEYSCEAGGQRVSFQLHITEPKAVFAKEQLVHNEVRTEAGASATLSCEVAQAQTEVTWYKDGKKLSSSSKVRIEAAGCMRQLVVQQAGQADAGEYTCEAGGQRLSFHLDVSEPKAVFAKEQLAHRKVQAEAGAIATLSCEVAQAQTEVTWYKDGKKLSSSSKVRMEAVGCTRRLVVQQACQADTGEYSCEAGGQRLSFSLDVAEPKVVFAKEQPVHREVQAQAGASTTLSCEVAQAQTEVMWYKDGKKLSFSSKVRMEAVGCTRRLVVQQAGQAVAGEYSCEAGSQRLSFHLHVAEPKAVFAKEQPASREVQAEAGTSATLSCEVAQAQTEVTWYKDGKKLSSSSKVRMEAVGCTRRLVVQEAGQADAGEYSCKAGDQRLSFHLHVAEPKVVFAKEQPAHREVQAEAGASATLSCEVAQAQTEVTWYKDGKKLSSSSKVRVEAVGCTRRLVVQQAGQADAGEYSCEAGGQRLSFRLHVAELEPQISERPCRREPLVVKEHEDIILTATLATPSAATVTWLKDGVEIRRSKRHETASQGDTHTLTVHGAQVLDSAIYSCRVGAEGQDFPVQVEEVAAKFCRLLEPVCGELGGTVTLACELSPACAEVVWRCGNTQLRVGKRFQMVAEGPVRSLTVLGLRAEDAGEYVCESRDDHTSAQLTVSVPRVVKFMSGLSTVVAEEGGEATFQCVVSPSDVAVVWFRDGALLQPSEKFAISQSGASHSLTISDLVLEDAGQITVEAEGASSSAALRVREAPVLFKKKLEPQTVEERSSVTLEVELTRPWPELRWTRNATALAPGKNVEIHAEGARHRLVLHNVGFADRGFFGCETPDDKTQAKLTVEMRQVRLVRGLQAVEAREQGTATMEVQLSHADVDGSWTRDGLRFQQGPTCHLAVRGPMHTLTLSGLRPEDSGLMVFKAEGVHTSARLVVTELPVSFSRPLQDVVTTEKEKVTLECELSRPNVDVRWLKDGVELRAGKTMAIAAQGACRSLTIYRCEFADQGVYVCDAHDAQSSASVKVQGRTYTLIYRRVLAEDAGEIQFVAENAESRAQLRVKELPVTLVRPLRDKIAMEKHRGVLECQVSRASAQVRWFKGSQELQPGPKYELVSDGLYRKLIISDVHAEDEDTYTCDAGDVKTSAQFFVEEQSITIVRGLQDVTVMEPAPAWFECETSIPSVRPPKWLLGKTVLQAGGNVGLEQEGTVHRLMLRRTCSTMTGPVHFTVGKSRSSARLVVSDIPVVLTRPLEPKTGRELQSVVLSCDFRPAPKAVQWYKDDTPLSPSEKFKMSLEGQMAELRILRLMPADAGVYRCQAGSAHSSTEVTVEAREVTVTGPLQDAEATEEGWASFSCELSHEDEEVEWSLNGMPLYNDSFHEISHKGRRHTLVLKSIQRADAGIVRASSLKVSTSARLEVRVKPVVFLKALDDLSAEERGTLALQCEVSDPEAHVVWRKDGVQLGPSDKYDFLHTAGTRGLVVHDVSPEDAGLYTCHVGSEETRARVRVHDLHVGITKRLKTMEVLEGESCSFECVLSHESASDPAMWTVGGKTVGSSSRFQATRQGRKYILVVREAAPSDAGEVVFSVRGLTSKASLIVRERPAAIIKPLEDQWVAPGEDVELRCELSRAGTPVHWLKDRKAIRKSQKYDVVCEGTMAMLVIRGASLKDAGEYTCEVEASKSTASLHVEEKANCFTEELTNLQVEEKGTAVFTCKTEHPAATVTWRKGLLELRASGKHQPSQEGLTLRLTISALEKADSDTYTCDIGQAQSRAQLLVQGRRVHIIEDLEDVDVQEGSSATFRCRISPANYEPVHWFLDKTPLHANELNEIDAQPGGYHVLTLRQLALKDSGTIYFEAGDQRASAALRVTEKPSVFSRELTDATITEGEDLTLVCETSTCDIPVCWTKDGKTLRGSARCQLSHEGHRAQLLITGATLQDSGRYKCEAGGACSSSIVRVHARPVRFQEALKDLEVLEGGAATLRCVLSSVAAPVKWCYGNNVLRPGDKYSLRQEGAMLELVVRNLRPQDSGRYSCSFGDQTTSATLTVTALPAQFIGKLRNKEATEGATATLRCELSKAAPVEWRKGSETLRDGDRYCLRQDGAMCELQIRGLAMVDAAEYSCVCGEERTSASLTIRPMPAHFIGRLRHQESIEGATATLRCELSKAAPVEWRKGRESLRDGDRHSLRQDGAVCELQICGLAVADAGEYSCVCGEERTSATLTVKALPAKFTEGLRNEEAVEGATAMLWCELSKVAPVEWRKGPENLRDGDRYILRQEGTRCELQICGLAMADAGEYLCVCGQERTSATLTIRALPARFIEDVKNQEAREGATAVLQCELNSAAPVEWRKGSETLRDGDRYSLRQDGTKCELQIRGLAMADTGEYSCVCGQERTSAMLTVRALPIKFTEGLRNEEATEGATAVLRCELSKMAPVEWWKGHETLRDGDRHSLRQDGARCELQIRGLVAEDAGEYLCMCGKERTSAMLTVRAMPSKFIEGLRNEEATEGDTATLWCELSKAAPVEWRKGHETLRDGDRHSLRQDGSRCELQIRGLAVVDAGEYSCVCGQERTSATLTVRALPARFIEDVKNQEAREGATAVLQCELSKAAPVEWRKGSETLRGGDRYSLRQDGTRCELQIHGLSVADTGEYSCVCGQERTSATLTVRAPQPVFREPLQSLQAEEGSTATLQCELSEPTATVVWSKGGLQLQANGRREPRLQGCTAELVLQDLQREDTGEYTCTCGSQATSATLTVTAAPVRFLRELQHQEVDEGGTAHLCCELSRAGASVEWRKGSLQLFPCAKYQMVQDGAAAELLVRGVEQEDAGDYTCDTGHTQSMASLSVRVPRPKFKTRLQSLEQETGDIARLCCQLSDAESGAVVQWLKEGVELHAGPKYEMRSQGATRELLIHQLEAKDTGEYACVTGGQKTAASLRVTEPEVTIVRGLVDAEVTADEDVEFSCEVSRAGATGVQWCLQGLPLQSNEVTEVAVRDGRIHTLRLKGVTPEDAGTVSFHLGNHASSAQLTVRAPEVTILEPLQDVQLSEGQDASFQCRLSRASGQEARWALGGVPLQANEMNDITVEQGTLHLLTLHKVTLEDAGTVSFHVGTCSSEAQLKVTAKNTVVRGLENVEALEGGEALFECQLSQPEVAAHTWLLDDEPVHTSENAEVVFFENGLRHLLLLKNLRPQDSCRVTFLAGDMVTSAFLTVRGWRLEILEPLKNAAVRAGAQACFTCTLSEAVPVGEASWYINGAAVQPDDSDWTVTADGSHHALLLRSAQPHHAGEVTFACRDAVASARLTVLGLPDPPEDAEVVARSSHTVTLSWAAPMSDGGGGLCGYRVEVKEGATGQWRLCHELVPGPECVVDGLAPGETYRFRVAAVGPVGAGEPVHLPQTVRLAEPPKPVPPQPSAPESRQVAAGEDVSLELEVVAEAGEVIWHKGMERIQPGGRFEVVSQGRQQMLVIKGFTAEDQGEYHCGLAQGSICPAAATFQVALSPASVDEAPQPSLPPEAAQEGDLHLLWEALARKRRMSREPTLDSISELPEEDGRSQRLPQEAEEVAPDLSEGYSTADELARTGDADLSHTSSDDESRAGTPSLVTYLKKAGRPGTSPLASKVGAPAAPSVKPQQQQEPLAAVRPPLGDLSTKDLGDPSMDKAAVKIQAAFKGYKVRKEMKQQEGPMFSHTFGDTEAQVGDALRLECVVASKADVRARWLKDGVELTDGRHHHIDQLGDGTCSLLITGLDRADAGCYTCQVSNKFGQVTHSACVVVSGSESEAESSSGGELDDAFRRAARRLHRLFRTKSPAEVSDEELFLSADEGPAEPEEPADWQTYREDEHFICIRFEALTEARQAVTRFQEMFATLGIGVEIKLVEQGPRRVEMCISKETPAPVVPPEPLPSLLTSDAAPVFLTELQNQEVQDGYPVSFDCVVTGQPMPSVRWFKDGKLLEEDDHYMINEDQQGGHQLIITAVVPADMGVYRCLAENSMGVSSTKAELRVDLTSTDYDTAADATESSSYFSAQGYLSSREQEGTESTTDEGQLPQVVEELRDLQVAPGTRLAKFQLKVKGYPAPRLYWFKDGQPLTASAHIRMTDKKILHTLEIISVTREDSGQYAAYISNAMGAAYSSARLLVRGPDEPEEKPASDVHEQLVPPRMLERFTPKKVKKGSSITFSVKVEGRPVPTVHWLREEAERGVLWIGPDTPGYTVASSAQQHSLVLLDVGRQHQGTYTCIASNAAGQALCSASLHVSGLPKVEEQEKVKEALISTFLQGTTQAISAQGLETASFADLGGQRKEEPLAAKEALGHLSLAEVGTEEFLQKLTSQITEMVSAKITQAKLQVPGGDSDEDSKTPSASPRHGRSRPSSSIQESSSESEDGDARGEIFDIYVVTADYLPLGAEQDAITLREGQYVEVLDAAHPLRWLVRTKPTKSSPSRQGWVSPAYLDRRLKLSPEWGAAEAPEFPGEAVSEDEYKARLSSVIQELLSSEQAFVEELQFLQSHHLQHLERCPHVPIAVAGQKAVIFRNVRDIGRFHSSFLQELQQCDTDDDVAMCFIKNQAAFEQYLEFLVGRVQAESVVVSTAIQEFYKKYAEEALLAGDPSQPPPPPLQHYLEQPVERVQRYQALLKELIRNKARNRQNCALLEQAYAVVSALPQRAENKLHVSLMENYPGTLQALGEPIRQGHFIVWEGAPGARMPWKGHNRHVFLFRNHLVICKPRRDSRTDTVSYVFRNMMKLSSIDLNDQVEGDDRAFEVWQEREDSVRKYLLQARTAIIKSSWVKEICGIQQRLALPVWRPPDFEEELADCTAELGETVKLACRVTGTPKPVISWYKDGKAVQVDPHHILIEDPDGSCALILDSLTGVDSGQYMCFAASAAGNCSTLGKILVQVPPRFVNKVRASPFVEGEDAQFTCTIEGAPYPQIRWYKDGALLTTGNKFQTLSEPRSGLLVLVIRAASKEDLGLYECELVNRLGSARASAELRIQSPMLQAQEQCHREQLVAAVEVTEQETKVPKKTVIIEETITTVVKSPRGQRRSPSKSPSRSPSRCSASPLRPGLLAPDLLYLPGAGQPRRPEAEPGQKPVVPTLYVTEAEAHSPALPGLSGPQPKWVEVEETIEVRVKKMGPQGVSPTTEVPRSSSGHLFTLPGATPGGDPNSNNSNNKLLAQEAWAQGTAMVGVREPLVFRVDARGSVDWAASGMGSLEEEGTMEEAGEEEGEDGDAFVTEESQDTHSLGDRDPKILTHNGRMLTLADLEDYVPGEGETFHCGGPGPGAPDDPPCEVSVIQREIGEPTVGQPVLLSVGHALGPRGPLGLFRPEPRGASPPGPQVRSLEGTSFLLREAPARPVGSAPWTQSFCTRIRRSADSGQSSFTTELSTQTVNFGTVGETVTLHICPDRDGDEAAQP

SEQ ID NO: 653 - protein, 4097 aa, Homo sapiens
MAGSGAGVRCSLLRLQETLSAADRCGAALAGHQLIRGLGQECVLSSSPAVLALQTSLVFSRDFGLLVFVRKSLNSIEFRECREEILKFLCIFLEKMGQKIAPYSVEIKNTCTSVYTKDRAAKCKIPALDLLIKLLQTFRSSRLMDEFKIGELFSKFYGELALKKKIPDTVLEKVYELLGLLGEVHPSEMINNAENLFRAFLGELKTQMTSAVREPKLPVLAGCLKGLSSLLCNFTKSMEEDPQTSREIFNFVLKAIRPQIDLKRYAVPSAGLRLFALHASQFSTCLLDNYVSLFEVLLKWCAHTNVELKKAALSALESFLKQVSNMVAKNAEMHKNKLQYFMEQFYGIIRNVDSNNKELSIAIRGYGLFAGPCKVINAKDVDFMYVELIQRCKQMFLTQTDTGDDRVYQMPSFLQSVASVLLYLDTVPEVYTPVLEHLVVMQIDSFPQYSPKMQLVCCRAIVKVFLALAAKGPVLRNCISTVVHQGLIRICSKPVVLPKGPESESEDHRASGEVRTGKWKVPTYKDYVDLFRHLLSSDQMMDSILADEAFFSVNSSSESLNHLLYDEFVKSVLKIVEKLDLTLEIQTVGEQENGDEAPGVWMIPTSDPAANLHPAKPKDFSAFINLVEFCREILPEKQAEFFEPWVYSFSYELILQSTRLPLISGFYKLLSITVRNAKKIKYFEGVSPKSLKHSPEDPEKYSCFALFVKFGKEVAVKMKQYKDELLASCLTFLLSLPHNIIELDVRAYVPALQMAFKLGLSYTPLAEVGLNALEEWSIYIDRHVMQPYYKDILPCLDGYLKTSALSDETKNNWEVSALSRAAQKGFNKVVLKHLKKTKNLSSNEAISLEEIRIRVVQMLGSLGGQINKNLLTVTSSDEMMKSYVAWDREKRLSFAVPFREMKPVIFLDVFLPRVTELALTASDRQTKVAACELLHSMVMFMLGKATQMPEGGQGAPPMYQLYKRTFPVLLRLACDVDQVTRQLYEPLVMQLIHWFTNNKKFESQDTVALLEAILDGIVDPVDSTLRDFCGRCIREFLKWSIKQITPQQQEKSPVNTKSLFKRLYSLALHPNAFKRLGASLAFNNIYREFREEESLVEQFVFEALVIYMESLALAHADEKSLGTIQQCCDAIDHLCRIIEKKHVSLNKAKKRRLPRGFPPSASLCLLDLVKWLLAHCGRPQTECRHKSIELFYKFVPLLPGNRSPNLWLKDVLKEEGVSFLINTFEGGGCGQPSGILAQPTLLYLRGPFSLQATLCWLDLLLAALECYNTFIGERTVGALQVLGTEAQSSLLKAVAFFLESIAMHDIIAAEKCFGTGAAGNRTSPQEGERYNYSKCTVVVRIMEFTTTLLNTSPEGWKLLKKDLCNTHLMRVLVQTLCEPASIGFNIGDVQVMAHLPDVCVNLMKALKMSPYKDILETHLREKITAQSIEELCAVNLYGPDAQVDRSRLAAVVSACKQLHRAGLLHNILPSQSTDLHHSVGTELLSLVYKGIAPGDERQCLPSLDLSCKQLASGLLELAFAFGGLCERLVSLLLNPAVLSTASLGSSQGSVIHFSHGEYFYSLFSETINTELLKNLDLAVLELMQSSVDNTKMVSAVLNGMLDQSFRERANQKHQGLKLATTILQHWKKCDSWWAKDSPLETKMAVLALLAKILQIDSSVSFNTSHGSFPEVFTTYISLLADTKLDLHLKGQAVTLLPFFTSLTGGSLEELRRVLEQLIVAHFPMQSREFPPGTPRFNNYVDCMKKFLDALELSQSPMLLELMTEVLCREQQHVMEELFQSSFRRIARRGSCVTQVGLLESVYEMFRKDDPRLSFTRQSFVDRSLLTLLWHCSLDALREFFSTIVVDAIDVLKSRFTKLNESTFDTQITKKMGYYKILDVMYSRLPKDDVHAKESKINQVFHGSCITEGNELTKTLIKLCYDAFTENMAGENQLLERRRLYHCAAYNCAISVICCVFNELKFYQGFLFSEKPEKNLLIFENLIDLKRRYNFPVEVEVPMERKKKYIEIRKEAREAANGDSDGPSYMSSLSYLADSTLSEEMSQFDFSTGVQSYSYSSQDPRPATGRFRRREQRDPTVHDDVLELEMDELNRHECMAPLTALVKHMHRSLGPPQGEEDSVPRDLPSWMKFLHGKLGNPIVPLNIRLFLAKLVINTEEVFRPYAKHWLSPLLQLAASENNGGEGIHYMVVEIVATILSWTGLATPTGVPKDEVLANRLLNFLMKHVFHPKRAVFRHNLEIIKTLVECWKDCLSIPYRLIFEKFSGKDPNSKDNSVGIQLLGIVMANDLPPYDPQCGIQSSEYFQALVNNMSFVRYKEVYAAAAEVLGLILRYVMERKNILEESLCELVAKQLKQHQNTMEDKFIVCLNKVTKSFPPLADRFMNAVFFLLPKFHGVLKTLCLEVVLCRVEGMTELYFQLKSKDFVQVMRHRDDERQKVCLDIIYKMMPKLKPVELRELLNPVVEFVSHPSTTCREQMYNILMWIHDNYRDPESETDNDSQEIFKLAKDVLIQGLIDENPGLQLIIRNFWSHETRLPSNTLDRLLALNSLYSPKIEVHFLSLATNFLLEMTSMSPDYPNPMFEHPLSECEFQEYTIDSDWRFRSTVLTPMFVETQASQGTLQTRTQEGSLSARWPVAGQIRATQQQHDFTLTQTADGRSSFDWLTGSSTDPLVDHTSPSSDSLLFAHKRSERLQRAPLKSVGPDFGKKRLGLPGDEVDNKVKGAAGRTDLLRLRRRFMRDQEKLSLMYARKGVAEQKREKEIKSELKMKQDAQVVLYRSYRHGDLPDIQIKHSSLITPLQAVAQRDPIIAKQLFSSLFSGILKEMDKFKTLSEKNNITQKLLQDFNRFLNTTFSFFPPFVSCIQDISCQHAALLSLDPAAVSAGCLASLQQPVGIRLLEEALLRLLPAELPAKRVRGKARLPPDVLRWVELAKLYRSIGEYDVLRGIFTSEIGTKQITQSALLAEARSDYSEAAKQYDEALNKQDWVDGEPTEAEKDFWELASLDCYNHLAEWKSLEYCSTASIDSENPPDLNKIWSEPFYQETYLPYMIRSKLKLLLQGEADQSLLTFIDKAMHGELQKAILELHYSQELSLLYLLQDDVDRAKYYIQNGIQSFMQNYSSIDVLLHQSRLTKLQSVQALTEIQEFISFISKQGNLSSQVPLKRLLNTWTNRYPDAKMDPMNIWDDIITNRCFFLSKIEEKLTPLPEDNSMNVDQDGDPSDRMEVQEQEEDISSLIRSCKFSMKMKMIDSARKQNNFSLAMKLLKELHKESKTRDDWLVSWVQSYCRLSHCRSRSQGCSEQVLTVLKTVSLLDENNVSSYLSKNILAFRDQNILLGTTYRIIANALSSEPACLAEIEEDKARRILELSGSSSEDSEKVIAGLYQRAFQHLSEAVQAAEEEAQPPSWSCGPAAGVIDAYMTLADFCDQQLRKEEENASVIDSAELQAYPALVVEKMLKALKLNSNEARLKFPRLLQIIERYPEETLSLMTKEISSVPCWQFISWISHMVALLDKDQAVAVQHSVEEITDNYPQAIVYPFIISSESYSFKDTSTGHKNKEFVARIKSKLDQGGVIQDFINALDQLSNPELLFKDWSNDVRAELAKTPVNKKNIEKMYERMYAALGDPKAPGLGAFRRKFIQTFGKEFDKHFGKGGSKLLRMKLSDFNDITNMLLLKMNKDSKPPGNLKECSPWMSDFKVEFLRNELEIPGQYDGRGKPLPEYHVRIAGFDERVTVMASLRRPKRIIIRGHDEREHPFLVKGGEDLRQDQRVEQLFQVMNGILAQDSACSQRALQLRTYSVVPMTSSDPRAPPCEYKDWLTKMSGKHDVGAYMLMYKGANRTETVTSFRKRESKVPADLLKRAFVRMSTSPEAFLALRSHFASSHALICISHWILGIGDRHLNNFMVAMETGGVIGIDFGHAFGSATQFLPVPELMPFRLTRQFINLMLPMKETGLMYSIMVHALRAFRSDPGLLTNTMDVFVKEPSFDWKNFEQKMLKKGGSWIQEINVAEKNWYPRQKICYAKRKLAGANPAVITCDELLLGHEKAPAFRDYVAVARGSKDHNIRAQEPESGLSEETQVKCLMDQATDPNILGRTWEGWEPWM

SEQ ID NO: 654 - protein, 108 aa, Homo sapiens
DIQMTQSPSSLSASVGDRVTITCQASQDINHYLNWYQQGPKKAPKILIYDASNLETGVPSRFSGSGFGTDFTFTISGLQPEDIATYYCQQYDTLPRTFGQGTKLEIKR

SEQ ID NO: 655 - protein, 108 aa, Homo sapiens
DIQMTQSPSSLSASVGDRVTITCRASQGIRNDLTWYQQKPGTAPKRLIYGATSLQSGVPSRFSGSGSGTEFTLTINSLQPEDFATYYCLQYSSFPWTFGQGTKVEVKR

SEQ ID NO: 656 - protein, 108 aa, Homo sapiens
DIQMTQSPSSLSASVGDRVTITCQASQDISDYLNWYQQKPGKAPKLLIYDASNLESGVPSRFSGGGSGAHFTFTISSLQPEDIATYYCQQYDYLPWTFGQGTKVEIKR

SEQ ID NO: 657 - protein, 117 aa, Homo sapiens
GSSGDIVMTQSPLSLPVTPGEPASISCRSSQSLLHSNGYNYLDWYLQKPQQSPQLLIYLGSNRASGVPDRFSGSGSGTDFTLKISRVEAEDVGVYYCMQGLQTPQTFGQGTKVEIKR

SEQ ID NO: 658 - protein, 100 aa, Homo sapiens
VPSGEIVLTQSPGTLSLSPGERATLSCRASQSVSSSYLAWYQQKPGQAPRLLIYGATSRATGIPDRFSGSASGTDFTLTISRLEPEDFAVYYCQQYGNSQ

SEQ ID NO: 659 - protein, 108 aa, Homo sapiens
DIQMTQSPSSLSASVGDRVTITCRASQDITNYVNWFQQRPGQAPKVLIYGASILETGVPSRFSGSGSGTDFTFTISSLQPEDIATYYCQQYDTLPLTFGGGTKVDIKR

SEQ ID NO: 660 - protein, 120 aa, Homo sapiens
EVQLVESGGGLVQPGGSLRLSCAASGFTFSYYNMNWVRQVTGKGLEWVSAIGTAGDQYYADSVKGRFTISRNDSKNTLYLNMNSLRAEDTAVYYCARSPVSLVDGWLYYYYGSVWGQGTL

SEQ ID NO: 661 - protein, 133 aa, Homo sapiens
MVLQTQVFISLLLWISGAYGDIVMTQSPDSLAVSLGERATINCKSSQSVLYSSNNKNYLAWYQQKPGQPPKLLIYWASTRESGVPDRFSGSGSGTDFTLTISSLQAEDVAVYYCQQYDTIPTFGGGTKVEIKR

SEQ ID NO: 662 - protein, 8525 aa, Homo sapiens
MADDEDYEEVVEYYTEEVVYEEVPGETITKIYETTTTRTSDYEQSETSKPALAQPALAQPASAKPVERRKVIRKKVDPSKFMTPYIAHSQKMQDLFSPNKYKEKFEKTKGQPYASTTDTPELRRIKKVQDQLSEVKYRMDGDVAKTICHVDEKAKDIEHAKKVSQQVSKVLYKQNWEDTKDKYLLPPDAPELVQAVKNTAMFSKKLYTEDWEADKSLFYPYNDSPELRRVAQAQKALSDVAYKKGLAEQQAQFTPLADPPDIEFAKKVTNQVSKQKYKEDYENKIKGKWSETPCFEVANARMNADNISTRKYQEDFENMKDQIYFMQTETPEYKMNKKAGVAASKVKYKEDYEKNKGKADYNVLPASENPQLRQLKAAGDALSDKLYKENYEKTKAKSINYCETPKFKLDTVLQNFSSDKKYKDSYLKDILGHYVGSFEDPYHSHCMKVTAQNSDKNYKAEYEEDRGKGFFPQTITQEYEAIKKLDQCKDHTYKVHPDKTKFTQVTDSPVLLQAQVNSKQLSDLNYKAKHESEKFKCHIPPDTPAFIQHKVNAYNLSDNLYKQDWEKSKAKKFDIKVDAIPLLAAKANTKNTSDVMYKKDYEKNKGKMIGVLSINDDPKMLHSLKVAKNQSDRLYKENYEKTKAKSMNYCETPKYQLDTQLKNFSEARYKDLYVKDVLGHYVGSMEDPYHTHCMKVAAQNSDKSYKAEYEEDKGKCYFPQTITQEYEAIKKLDQCKDHTYKVHPDKTKFTAVTDSPVLLQAQLNTKQLSDLNYKAKHEGEKFKCHIPADAPQFIQHRVNAYNLSDNVYKQDWEKSKAKKFDIKVDAIPLLAAKANTKNTSDVMYKKDYEKSKGKMIGALSINDDPKMLHSLKTAKNQSDREYRKDYEKSKTIYTAPLDMLQVTQAKKSQAIASDVDYKHILHSYSYPPDSINVDLAKKAYALQSDVEYKADYNSWMKGCGWVPFGSLEMEKAKRASDILNEKKYRQHPDTLKFTSIEDAPITVQSKINQAQRSDIAYKAKGEEIIHKYNLPPDLPQFIQAKVNAYNISENMYKADLKDLSKKGYDLRTDAIPIRAAKAARQAASDVQYKKDYEKAKGKMVGFQSLQDDPKLVHYMNVAKIQSDREYKKDYEKTKSKYNTPHDMFNVVAAKKAQDVVSNVNYKHSLHHYTYLPDAMDLELSKNMMQIQSDNVYKEDYNNWMKGIGWIPIGSLDVEKVKKAGDALNEKKYRQHPDTLKFTSIVDSPVMVQAKQNTKQVSDILYKAKGEDVKHKYTMSPDLPQFLQAKCNAYNISDVCYKRDWHDLIAKGNNVLGDAIPITAAKASRNIASDYKYKEAYEKSKGKHVGFRSLQDDPKLVHYMNVAKLQSDREYKKNYENTKTSYHTPGDMVSITAAKMAQDVATNVNYKQPLHHYTYLPDAMSLEHTRNVNQIQSDNVYKDEYNSFLKGIGWIPIGSLEVEKVKKAGDALNERKYRQHPDTVKFTSVPDSMGMVLAQHNTKQLSDLNYKVEGEKLKHKYTIDPELPQFIQAKVNALNMSDAHYKADWKKTIAKGYDLRPDAIPIVAAKSSRNIASDCKYKEAYEKAKGKQVGFLSLQDDPKLVHYMNVAKIQSDREYKKGYEASKTKYHTPLDMVSVTAAKKSQEVATNANYRQSYHHYTLLPDALNVEHSRNAMQIQSDNLYKSDFTNWMKGIGWVPIESLEVEKAKKAGEILSEKKYRQHPEKLKFTYAMDTMEQALNKSNKLNMDKRLYTEKWNKDKTTIHVMPDTPDILLSRVNQITMSDKLYKAGWEEEKKKGYDLRPDAIAIKAARASRDIASDYKYKKAYEQAKGKHIGFRSLEDDPKLVHFMQVAKMQSDREYKKGYEKSKTSFHTPVDMLSVVAAKKSQEVATNANYRNVIHTYNMLPDAMSFELAKNMMQIQSDNQYKADYADFMKGIGWLPLGSLEAEKNKKAMEIISEKKYRQHPDTLKYSTLMDSMNMVLAQNNAKIMNEHLYKQAWEADKTKVHIMPDIPQIILAKANAINMSDKLYKLSLEESKKKGYDLRPDAIPIKAAKASRDIASDYKYKYNYEKGKGKMVGFRSLEDDPKLVHSMQVAKMQSDREYKKNYENTKTSYHTPADMLSVTAAKDAQANITNTNYKHLIHKYILLPDAMNIELTRNMNRIQSDNEYKQDYNEWYKGLGWSPAGSLEVEKAKKATEYASDQKYRQHPSNFQFKKLTDSMDMVLAKQNAHTMNKHLYTIDWNKDKTKIHVMPDTPDILQAKQNQTLYSQKLYKLGWEEALKKGYDLPVDAISVQLAKASRDIASDYKYKQGYRKQLGHHVGFRSLQDDPKLVLSMNVAKMQSEREYKKDFEKWKTKFSSPVDMLGVVLAKKCQELVSDVDYKNYLHQWTCLPDQNDVVQAKKVYELQSENLYKSDLEWLRGIGWSPLGSLEAEKNKRASEIISEKKYRQPPDRNKFTSIPDAMDIVLAKTNAKNRSDRLYREAWDKDKTQIHIMPDTPDIVLAKANLINTSDKLYRMGYEELKRKGYDLPVDAIPIKAAKASREIASEYKYKEGFRKQLGHHIGARNIEDDPKMMWSMHVAKIQSDREYKKDFEKWKTKFSSPVDMLGVVLAKKCQTLVSDVDYKNYLHQWTCLPDQSDVIHARQAYDLQSDNLYKSDLQWLKGIGWMTSGSLEDEKNKRATQILSDHVYRQHPDQFKFSSLMDSIPMVLAKNNAITMNHRLYTEAWDKDKTTVHIMPDTPEVLLAKQNKVNYSEKLYKLGLEEAKRKGYDMRVDAIPIKAAKASRDIASEFKYKEGYRKQLGHHIGARAIRDDPKMMWSMHVAKIQSDREYKKDFEKWKTKFSSPVDMLGVVLAKKCQTLVSDVDYKNYLHQWTCLPDQSDVIHARQAYDLQSDNMYKSDLQWMRGIGWVSIGSLDVEKCKRATEILSDKIYRQPPDRFKFTSVTDSLEQVLAKNNAITMNKRLYTEAWDKDKTQIHIMPDTPEIMLARMNKINYSESLYKLANEEAKKKGYDLRSDAIPIVAAKASRDIISDYKYKDGYCKQLGHHIGARNIEDDPKMMWSMHVAKIQSDREYKKDFEKWKTKFSSPVDMLGVVLAKKCQTLVSDVDYKNYLHEWTCLPDQSDVIHARQAYDLQSDNIYKSDLQWLRGIGWVPIGSMDVVKCKRATEILSDNIYRQPPDKLKFTSVTDSLEQVLAKNNALNMNKRLYTEAWDKDKTQIHIMPDTPEIMLARQNKINYSETLYKLANEEAKKKGYDLRSDAIPIVAAKASRDVISDYKYKDGYRKQLGHHIGARNIEDDPKMMWSMHVAKIQSDREYKKDFEKWKTKFSSPVDMLGVVLAKKCQTLVSDVDYKNYLHEWTCLPDQNDVIHARQAYDLQSDNIYKSDLQWLRGIGWVPIGSMDVVKCKRAAEILSDNIYRQPPDKLKFTSVTDSLEQVLAKNNALNMNKRLYTEAWDKDKTQVHIMPDTPEIMLARQNKINYSESLYRQAMEEAKKEGYDLRSDAIPIVAAKASRDIASDYKYKEAYRKQLGHHIGARAVHDDPKIMWSLHIAKVQSDREYKKDFEKYKTRYSSPVDMLGIVLAKKCQTLVSDVDYKHPLHEWICLPDQNDIIHARKAYDLQSDNLYKSDLEWMKGIGWVPIDSLEVVRAKRAGELLSDTIYRQRPETLKFTSITDTPEQVLAKNNALNMNKRLYTEAWDNDKKTIHVMPDTPEIMLAKLNRINYSDKLYKLALEESKKEGYDLRLDAIPIQAAKASRDIASDYKYKEGYRKQLGHHIGARNIKDDPKMMWSIHVAKIQSDREYKKEFEKWKTKFSSPVDMLGVVLAKKCQILVSDIDYKHPLHEWTCLPDQNDVIQARKAYDLQSDAIYKSDLEWLRGIGWVPIGSVEVEKVKRAGEILSDRKYRQPADQLKFTCITDTPEIVLAKNNALTMSKHLYTEAWDADKTSIHVMPDTPDILLAKSNSANISQKLYTKGWDESKMKDYDLRADAISIKSAKASRDIASDYKYKEAYEKQKGHHIGAQSIEDDPKIMCAIHAGKIQSEREYKKEFQKWKTKFSSPVDMLSILLAKKCQTLVTDIDYRNYLHEWTCMPDQNDIIQAKKAYDLQSDSVYKADLEWLRGIGWMPEGSVEMNRVKVAQDLVNERLYRTRPEALSFTSIVDTPEVVLAKANSLQISEKLYQEAWNKDKSNITIPSDTPEMLQAHINALQISNKLYQKDWNDAKQKGYDIRADAIEIKHAKASREIASEYKYKEGYRKQLGHHMGFRTLQDDPKSVWAIHAAKIQSDREYKKAYEKSKGIHNTPLDMMSIVQAKKCQVLVSDIDYRNYLHQWTCLPDQNDVIQAKKAYDLQSDNLYKSDLEWLKGIGWLPEGSVEVMRVKNAQNLLNERLYRIKPEALKFTSIVDTPEVIQAKINAVQISEPLYRDAWEKEKANVNVPADTPLMLQSKINALQISNKRYQQAWEDVKMTGYDLRADAIGIQHAKASRDIASDYLYKTAYEKQKGHYIGCRSAKEDPKLVWAANVLKMQNDRLYKKAYNDHKAKISIPVDMVSISAAKEGQALASDVDYRHYLHHWSCFPDQNDVIQARKAYDLQSDSVYKADLEWLRGIGWMPEGSVEMNRVKVAQDLVNERLYRTRPEALSFTSIVDTPEVVLAKANSLQISEKLYQEAWNKDKSNITIPSDTPEMLQAHINALQISNKLYQKDWNDTKQKGYDIRADAIEIKHAKASREIASEYKYKEGYRKQLGHHMGFRTLQDDPKSVWAIHAAKIQSDREYKKAYEKSKGIHNTPLDMMSIVQAKKCQVLVSDIDYRNYLHQWTCLPDQNDVIQAKKAYDLQSDNLYKSDLEWLKGIGWLPEGSVEVMRVKNAQNLLNERLYRIKPEALKFTSIVDTPEVIQAKINAVQISEPLYRNAWEKEKANVNVPADTPLMLQSKINALQISNKRYQQAWEDVKMTGYDLRADAIGIQHAKASRDIASDYLYKTAYEKQKGHYIGCRSAKEDPKLVWAANVLKMQNDRLYKKAYNDHKAKISIPVDMVSISAAKEGQALASDVDYRHYLHHWSCFPDQNDVIQARKAYDLQSDSVYKADLEWLRGIGWMPEGSVEMNRVKVAQDLVNERLYRTRPEALSFTSIVDTPEVVLAKANSLQISEKLYQEAWNKDKSNITIPSDTPEMLQAHINALQISNKLYQKDWNDTKQKGYDIRADAIEIKHAKASREIASEYKYKEGYRKQLGHHMGFRTLQDDPKSVWAIHAAKIQSDREYKKAYEKSKGIHNTPLDMMSIVQAKKCQVLVSDIDYRNYLHQWTCLPDQNDVIQAKKAYDLQSDNLYKSDLEWLKGIGWLPEGSVEVMRVKNAQNLLNERLYRIKPEALKFTSIVDTPEVIQAKINAVQISEPLYRDAWEKEKANVNVPADTPLMLQSKINALQISNKRYQQAWEDVKMTGYDLRADAIGIQHAKASRDIASDYLYKTAYEKQKGHYIGCRSAKEDPKLVWAANVLKMQNDRLYKKAYNDHKAKISIPVDMVSISAAKEGQALASDVDYRHYLHRWSCFPDQNDVIQARKAYDLQSDALYKADLEWLRGIGWMPQGSPEVLRVKNAQNIFCDSVYRTPVVNLKYTSIVDTPEVVLAKSNAENISIPKYREVWDKDKTSIHIMPDTPEINLARANALNVSNKLYREGWDEMKAGCDVRLDAIPIQAAKASREIASDYKYKLDHEKQKGHYVGTLTARDDNKIRWALIADKLQNEREYRLDWAKWKAKIQSPVDMLSILHSKNSQALVSDMDYRNYLHQWTCMPDQNDVIQAKKAYELQSDNVYKADLEWLRGIGWMPNDSVSVNHAKHAADIFSEKKYRTKIETLNFTPVDDRVDYVTAKQSGEILDDIKYRKDWNATKSKYTLTETPLLHTAQEAARILDQYLYKEGWERQKATGYILPPDAVPFVHAHHCNDVQSELKYKAEHVKQKGHYVGVPTMRDDPKLVWFEHAGQIQNERLYKEDYHKTKAKINIPADMVSVLAAKQGQTLVSDIDYRNYLHQWMCHPDQNDVIQARKAYDLQSDNVYRADLEWLRGIGWIPLDSVDHVRVTKNQEMMSQIKYKKNALENYPNFRSVVDPPEIVLAKINSVNQSDVKYKETFNKAKGKYTFSPDTPHISHSKDMGKLYSTILYKGAWEGTKAYGYTLDERYIPIVGAKHADLVNSELKYKETYEKQKGHYLAGKVIGEFPGVVHCLDFQKMRSALNYRKHYEDTKANVHIPNDMMNHVLAKRCQYILSDLEYRHYFHQWTSLLEEPNVIRVRNAQEILSDNVYKDDLNWLKGIGCYVWDTPQILHAKKSYDLQSQLQYTAAGKENLQNYNLVTDTPLYVTAVQSGINASEVKYKENYHQIKDKYTTVLETVDYDRTRNLKNLYSSNLYKEAWDRVKATSYILPSSTLSLTHAKNQKHLASHIKYREEYEKFKALYTLPRSVDDDPNTARCLRVGKLNIDRLYRSVYEKNKMKIHIVPDMVEMVTAKDSQKKVSEIDYRLRLHEWICHPDLQVNDHVRKVTDQISDIVYKDDLNWLKGIGCYVWDTPEILHAKHAYDLRDDIKYKAHMLKTRNDYKLVTDTPVYVQAVKSGKQLSDAVYHYDYVHSVRGKVAPTTKTVDLDRALHAYKLQSSNLYKTSLRTLPTGYRLPGDTPHFKHIKDTRYMSSYFKYKEAYEHTKAYGYTLGPKDVPFVHVRRVNNVTSERLYRELYHKLKDKIHTTPDTPEIRQVKKTQEAVSELIYKSDFFKMQGHMISLPYTPQVIHCRYVGDITSDIKYKEDLQVLKGFGCFLYDTPDMVRSRHLRKLWSNYLYTDKARKMRDKYKVVLDTPEYRKVQELKTHLSELVYRAAGKKQKSIFTSVPDTPDLLRAKRGQKLQSQYLYVELATKERPHHHAGNQTTALKHAKDVKDMVSEKKYKIQYEKMKDKYTPVPDTPILIRAKRAYWNASDLRYKETFQKTKGKYHTVKDALDIVYHRKVTDDISKIKYKENYMSQLGIWRSIPDRPEHFHHRAVTDTVSDVKYKEDLTWLKGIGCYAYDTPDFTLAEKNKTLYSKYKYKEVFERTKSDFKYVADSPINRHFKYATQLMNERKYKSSAKMFLQHGCNEILRPDMLTALYNSHMWSQIKYRKNYEKSKDKFTSIVDTPEHLRTTKVNKQISDILYKLEYNKAKPRGYTTIHDTPMLLHVRKVKDEVSDLKYKEVYQRNKSNCTIEPDAVHIKAAKDAYKVNTNLDYKKQYEANKAHWKWTPDRPDFLQAAKSSLQQSDFEYKLDREFLKGCKLSVTDDKNTVLALRNTLIESDLKYKEKHVKERGTCHAVPDTPQILLAKTVSNLVSENKYKDHVKKHLAQGSYTTLPETRDTVHVKEVTKHVSDTNYKKKFVKEKGKSNYSIMLEPPEVKHAMEVAKKQSDVAYRKDAKENLHYTTVADRPDIKKATQAAKQASEVEYRAKHRKEGSHGLSMLGRPDIEMAKKAAKLSSQVKYRENFDKEKGKTPKYNPKDSQLYKVMKDANNLASEVKYKADLKKLHKPVTDMKESLIMNHVLNTSQLASSYQYKKKYEKSKGHYHTIPDNLEQLHLKEATELQSIVKYKEKYEKERGKPMLDFETPTYITAKESQQMQSGKEYRKDYEESIKGRNLTGLEVTPALLHVKYATKIASEKEYRKDLEESIRGKGLTEMEDTPDMLRAKNATQILNEKEYKRDLELEVKGRGLNAMANETPDFMRARNATDIASQIKYKQSAEMEKANFTSVVDTPEIIHAQQVKNLSSQKKYKEDAEKSMSYYETVLDTPEIQRVRENQKNFSLLQYQCDLKNSKGKITVVQDTPEILRVKENQKNFSSVLYKEDVSPGTAIGKTPEMMRVKQTQDHISSVKYKEAIGQGTPIPDLPEVKRVKETQKHISSVMYKENLGTGIPTTVTPEIERVKRNQENFSSVLYKENLGKGIPTPITPEMERVKRNQENFSSILYKENLSKGTPLPVTPEMERVKLNQENFSSVLYKENVGKGIPIPITPEMERVKHNQENFSSVLYKENLGTGIPIPITPEMQRVKHNQENLSSVLYKENMGKGTPLPVTPEMERVKHNQENISSVLYKENMGKGTPLPVTPEMERVKHNQENISSVLYKENMGKGTPLAVTPEMERVKHNQENISSVLYKENVGKATATPVTPEMQRVKRNQENISSVLYKENLGKATPTPFTPEMERVKRNQENFSSVLYKENMRKATPTPVTPEMERAKRNQENISSVLYSDSFRKQIQGKAAYVLDTPEMRRVRETQRHISTVKYHEDFEKHKGCFTPVVTDPITERVKKNMQDFSDINYRGIQRKVVEMEQKRNDQDQETITGLRVWRTNPGSVFDYDPAEDNIQSRSLHMINVQAQRRSREQSRSASALSISGGEEKSEHSEAPDHHLSTYSDGGVFAVSTAYKHAKTTELPQQRSSSVATQQTTVSSIPSHPSTAGKIFRAMYDYMAADADEVSFKDGDAIINVQAIDEGWMYGTVQRTGRTGMLPANYVEAI

SEQ ID NO: 663 - protein, 115 aa, Homo sapiens
EVQLLESGGGLVQPGGSLRLSCAASGFTFSTYVMSWVRQAPGKGLZWVGAIZGLSVSZSYABSVKGRFTISRDDSKNTMNSLRAEDTAVYYCAKGKVSAYYFBYWGZGTLVTVSS

SEQ ID NO: 664 - protein, 377 aa, Homo sapiens
ASTKGPSVFPLAPCSRSTSGGTAALGCLVKDYFPEPVTVSWNSGALTSGVHTFPAVLQSSGLYSLSSVVTVPSSSLGTQTYTCNVNHKPSNTKVDKRVELKTPLGDTTHTCPRCPEPKSCDTPPPCPRCPEPKSCDTPPPCPRCPEPKSCDTPPPCPRCPAPELLGGPSVFLFPPKPKDTLMISRTPEVTCVVVDVSHEDPEVQFKWYVDGVEVHNAKTKPREEQYNSTFRVVSVLTVLHQDWLNGKEYKCKVSNKALPAPIEKTISKTKGQPREPQVYTLPPSREEMTKNQVSLTCLVKGFYPSDIAVEWESSGQPENNYNTTPPMLDSDGSFFLYSKLTVDKSRWQQGNIFSCSVMHEALHNRFTQKSLSLSPGK

SEQ ID NO: 665 - protein, 4363 aa, Homo sapiens
MLEGLVAWVLNTYLGKYVNNLNTDQLSVALLKGAVELENLPLKKDALKELELPFEVKAGFIGKVTLQIPFYRPHVDPWVISISSLHLIGAPEKIQDFNDEKEKLLERERKKALLQALEEKWKNDRQQKGESYWYSVTASVVTRIVENIELKIQDVHLRFEDGVTNPSHPFAFGICIKNVSMQNAVNEPVQKLMRKKQLDVAEFSIYWDVDCTLLGDLPQMELQEAMARSMESRSHHYVLEPVFASALLKRNCSKKPLRSRHSPRIDCDIQLETIPLKLSQLQYRQIMEFLKELERKERQVKFRRWKPKVAISKNCREWWYFALNANLYEIREQRKRCTWDFMLHRARDAVSYTDKYFNKLKGGLLSTDDKEEMCRIEEEQSFEELKILRELVHDRFHKQEELAESLREPQFDSPGACPGAPEPGGGSGMLQYLQSWFPGWGGWYGQQTPEGNVVEGLSAEQQEQWIPEEILGTEEFFDPTADASCMNTYTKRDHVFAKLNLQLQRGTVTLLHKEQGTPQMNESAFMQLEFSDVKLLAESLPRRNSSLLSVRLGGLFLRDLATEGTMFPLLVFPNPQKEVGRVSQSFGLQTTSADRSDHYPAADPDGPVFEMLYERNPAHSHFERRLNVSTRPLNIIYNPQAIKKVADFFYKGKVHTSGFGYQSELELRVAEAARRQYNKLKMQTKAEIRQTLDRLLVGDFIEESKRWTVRLDISAPQVIFPDDFKFKNPVLVVVDLGRMLLTNTQDNSRRKSRDGSASEETQFSDDEYKTPLATPPNTPPPESSSSNGEKTPPFSGVEFSEEQLQAHLMSTKMYERYSLSFMDLQIMVGRVKDNWKHVQDIDVGPTHVVEKFNVHLQLERRLIYTSDPKYPGAVLSGNLPDLKIHINEDKISALKNCFALLTTPEMKTSDTQIKEKIFPQEEQRGSLQDSVMNLTQSIVLLEQHTREVLVESQLLLAEFKVNCMQLGVESNGRYISVLKVFGTNAHFVKRPYDAEVSLTVHGLLLVDTMQTYGADFDLLMASHKNLSFDIPTGSLRDSRAQSPVSGPNVAHLTDGATLNDRSATSVSLDKILTKEQESLIKLEYQFVSSECPSMNLDSTLQVISLQVNNLDIILNPETIVELIGFLQKSFPKEKDDLSPQPLMTDFERSFREQGTYQSTYEQNTEVAVEIHRLNLLLLRTVGMANREKYGRKIATASIGGTKVNVSMGSTFDMNGSLGCLQLMDLTQDNVKNQYVVSIGNSVGYENIISDIGYFESVFVRMEDAALTEALSFTFVERSKQECFLNLKMASLHYNHSAKFLKELTLSMDELEENFRGMLKSAATKVTTVLATKTAEYSEMVSLFETPRKTREPFILEENEIYGFDLASSHLDTVKLILNINIESPVVSIPRKPGSPELLVGHLGQIFIQNFVAGDDESRSDRLQVEIKDIKLYSLNCTQLAGREAVGSEGSRMFCPPSGSGSANSQEEAHFTRHDFFESLHRGQAFHILNNTTIQFKLEKIPIERESELTFSLSPDDLGTSSIMKIEGKFVNPVQVVLAKHVYEQVLQTLDNLVYSEDLNKYPASATSSPCPDSPLPPLSTCGESSVERKENGLFSHSSLSNTSQKSLSVKEVKSFTQIQATFCISELQVQLSGDLTLGAQGLVSLKFQDFEVEFSKDHPQTLSIQIALHSLLMEDLLEKNPDSKYKNLMVSRGAPKPSSLAQKEYLSQSCPSVSNVEYPDMPRSLPSHMEEAPNVFQLYQRPTSASRKKQKEVQDKDYPLTPPPSPTVDEPKILVGKSKFDDSLVHINIFLVDKKHPEFSSSYNRVNRSIDVDFNCLDVLITLQTWVVILDFFGIGSTADNHAMRLPPEGILHNVKLEPHASMESGLQDPVNTKLDLKVHSLSLVLNKTTSELAKANVSKLVAHLEMIEGDLALQGSIGSLSLSDLTCHGEFYRERFTTSGEEALIFQTFKYGRPDPLLRREHDIRVSLRMASVQYVHTQRFQAEVVAFIQHFTQLQDVLGRQRAAIEGQTVRDQAQRCSRVLLDIEAGAPVLLIPESSRSNNLIVANLGKLKVKNKFLFAGFPGTFSLQDKESVPSASPTGIPKHSLRKTTSTEEPRGTHSQGQFTMPLAGMSLGSLKSEFVPSTSTKQQGPQPTLSVGQESSSPEDHVCLLDCVVVDLQDMDIFAAERHPREYSKAPEDSSGDLIFPSYFVRQTGGSLLTEPCRLKLQVERNLDKEISHTVPDISIHGNLSSVHCSLDLYKYKLIRGLLENNLGEPIEEFMRPYDLQDPRIHTVLSGEVYTCMCFLIDMVNVSLELKDPKRKEGAGSLARFDFKKCKLLYESFSNQTKSINLVSHSMMAFDTRYAGQKTSPGMTNVFSCIFQPAKNSSTTQGSIQIELHFRSTKDSSCFTVVLNNLRVFLIFDWLLLVHDFLHTPSDIKKQNHVTPSRHRNSSSESAIVPKTVKSGVVTKRSSLPVSNERHLEVKVNVTGTEFVVIEDVSCFDTNAIILKGTTVLTYKPRFVDRPFSGSLFGIEVFSCRLGNEHDTALSIVDPVQIQMELVGNSSYQNSSGLMDAFNSEDFPPVLEIQLQALDIRLSYNDVQLFLAIAKSIPEQANAAVPDSVALESDSVGTYLPGASRVGEEIREGTRHTLDPVLELQLARLQELGFSMDDCRKALLACQGQLKKAASWLFKNAEPLKSLSLASTSRDSPGAVAAPLISGVEIKAESVCICFIDDCMDCDVPLAELTFSRLNFLQRVRTSPEGYAHFTLSGDYYNRALSGWEPFIEPWPCSVSWQQQAASRLHPPRLKLEAKAKPRLDINITSVLIDQYVSTKESWMADYCKDDKDIESAKSEDWMGSSVDPPCFGQTEVKTPKRRQPFVPFALRNHTGCTLWFATLTTTPTRAALSHSGSPGVVPEGNGTFLDDTHNVSEWREVLTGEEIPFEFEARGKLRHRHTHDLRIHQLQVRVNGWEQVSPVSVDKVGTFFRYAAPDKNSSSSTIGSPSSRTNIIHPQVYFSSLPPVRVVFAVTMEGSARKVITVRSALIVRNRLETPMELRLDSPSAPDKPVVLPAIMPGDSFAVPLHLTSWRLQARPKGLGVFFCKAPIHWTNVVKTAEISSSKRECHSMDTEKSRFFRFCVAIKKENYPDYMPSNIFSDSAKQIFRQPGHTIYLLPTVVICNLLPCELDFYVKGMPINGTLKPGKEAALHTADTSQNIELGVSLENFPLCKELLIPPGTQNYMVRMRLYDVNRRQLNLTIRIVCRAEGSLKIFISAPYWLINKTGLPLIFRQDNAKTDAAGQFEEHELARSLSPLLFCYADKEQPNLCTMRIGRGIHPEGMPGWCQGFSLDGGSGVRALKVIQQGNRPGLIYNIGIDVKKGRGRYIDTCMVIFAPRYLLDNKSSHKLAFAQREFARGQGTANPEGYISTLPGSSVVFHWPRNDYDQLLCVRLMDVPNCIWSGGFEVNKNNSFHINMRDTLGKCFFLRVEITLRGATYRISFSDTDQLPPPFRIDNFSKVPVVFTQHGVAEPRLRTEVKPMTSLDYAWDEPTLPPFITLTVKGAGSSEINCNMNDFQDNRQLYYENFIYIAATYTFSGLQEGTGRPVASNKAITCAELVLDVSPKTQRVILKKKEPGKRSQLWRMTGTGMLAHEGSSVPHNPNKPSAARSTEGSAILDIAGLAAVTDNRYEPLMLRKPDRRRSTTQTWSFREGKLTCGLHGLVVQAKGGLSGLFDGAEVVLGPDTSMELLGPVPPEQQFINQKMRPGSGMLSIRVIPDGPTRALQITDFCHRKSSRSYEVDELPVTEQELQKLKNPDTEQELEVLVRLEGGIGLSLINKVPEELVFASLTGINVHYTQLATSHMLELSIQDVQVDNQLIGTTQPFMLYVTPLSNENEVIETGPAVQVNAVKFPSKSALTNIYKHLMITAQRFTVQIEEKLLLKLLSFFGYDQAESEVEKYDENLHEKTAEQGGTPIRYYFENLKISIPQIKLSVFTSNKLPLDLKALKSTLGFPLIRFEDAVINLDPFTRVHPYETKEFIINDILKHFQEELLSQAARILGSVDFLGNPMGLLNDVSEGVTGLIKYGNVGGLIRNVTHGVSNSAAKFAGTLSDGLGKTMDNRHQSEREYIRYHAATSGEHLVAGIHGLAHGIIGGLTSVITSTVEGVKTEGGVSGFISGLGKGLVGTVTKPVAGALDFASETAQAVRDTATLSGPRTQAQRVRKPRCCTGPQGLLPRYSESQAEGQEQLFKLTDNIQDEFFIAVENIDSYCVLISSKAVYFLKSGDYVDREAIFLEVKYDDLYHCLVSKDHGKVYVQVTKKAVSTSSGVSIPGPSHQKPMVHVKSEVLAVKLSQEINYAKSLYYEQQLMLRLSENREQLELDS

SEQ ID NO: 666 - protein, 513 aa, Homo sapiens
MTTQLPAYVAILLFYVSRASCQDTFTAAVYEHAAILPNATLTPVSREEALALMNRNLDILEGAITSAADQGAHIIVTPEDAIYGWNFNRDSLYPYLEDIPDPEVNWIPCNNRNRFGQTPVQERLSCLAKNNSIYVVANIGDKKPCDTSDPQCPPDGRYQYNTDVVFDSQGKLVARYHKQNLFMGENQFNVPKEPEIVTFNTTFGSFGIFTCFDILFHDPAVTLVKDFHVDTIVFPTAWMNVLPHLSAVEFHSAWAMGMRVNFLASNIHYPSKKMTGSGIYAPNSSRAFHYDMKTEEGKLLLSQLDSHPSHSAVVNWTSYASSIEALSSGNKEFKGTVFFDEFTFVKLTGVAGNYTVCQKDLCCHLSYKMSENIPNEVYALGAFDGLHTVEGRYYLQICTLLKCKTTNLNTCGDSAETASTRFEMFSLSGTFGTQYVFPEVLLSENQLAPGEFQVSTDGRLFSLKPTSGPVLTVTLFGRLYEKDWASNASSGLTAQARIIMLIVIAPIVCSLSW

SEQ ID NO: 667 - protein, 231 aa, Homo sapiens
MEFWLSWVLLVAILKDVQCEVQLVESGGGLVQPGGSLRLSCSASGFTFSSYAMHWVRQAPGKGLEYVSAISSNGGSTYYADSVKGRFTISRDNSKNTLYLQMSSLRAEDTAVYYCVKDTVRGIVLRMSKAQGLCCCSHFSICFSCFLRNKDVFAVVKIPGLKPFSWSSGGSQAVAAAVTWERLVGLSSLLVTQDPPLCCMETHVEIQVASENTGDKLVWLTWDVDVFLILF

SEQ ID NO: 668 - protein, 326 aa, Homo sapiens
ASTKGPSVFPLAPCSRSTSESTAALGCLVKDYFPEPVTVSWNSGALTSGVHTFPAVLQSSGLYSLSSVVTVPSSNFGTQTYTCNVDHKPSNTKVDKTVERKCCVECPPCPAPPVAGPSVFLFPPKPKDTLMISRTPEVTCVVVDVSHEDPEVQFNWYVDGVEVHNAKTKPREEQFNSTFRVVSVLTVVHQDWLNGKEYKCKVSNKGLPAPIEKTISKTKGQPREPQVYTLPPSREEMTKNQVSLTCLVKGFYPSDISVEWESNGQPENNYKTTPPMLDSDGSFFLYSKLTVDKSRWQQGNVFSCSVMHEALHNHYTQKSLSLSPGK

SEQ ID NO: 669 - protein, 129 aa, Homo sapiens
MDMRVPAQLLGLLLLWLRGARCDIQMTQSPSSLSASVGDRVTITCRASQSISNYLNWYQQKPGKAPKLLIYAASSLQSGVTSRFSGSGSGTDFTLTISSLQPEDSATYYCQQSYSTLITFGQGTRLEIK

SEQ ID NO: 670 - protein, 117 aa, Homo sapiens
MDMRVPAQLLGLLLLWLPGAKCDIQMTQSPSTLSASVGDRVTITCRASQSISSWLAWYQQKPGKAPKLLIYDASSLESGVPSRFSGSGSGTEFTLTISSLQPDDFATYYCQQYNSYS

SEQ ID NO: 671 - protein, 108 aa, Homo sapiens
DIQMTQSPSSLSASVGDRVTIICRASQGIRNDLTWYQQKPGKAPKELIYAASNLQSGVPSRFSGSGAGTEFTLTISSLQPEDFATYYCLQQNSYPRSFGQGTKVEIKR

SEQ ID NO: 672 - protein, 295 aa, Homo sapiens
MDKLTYAFENKPLHKSEKRTTKESWLSWLFLVAILKGVQCEVQLVESGGGLVKPGGSLRLSCAASGFTFSDYYMNWVRQAPGKGLEWVSSISSSSTIYYADSVKGRFTISRDNAKNSLYLQMNSLRAEDTAVYYCARFHWFFPMTKTRRLHVQCGSIEEDPVWVLSQVTLKESGPALVKPTQTLTLTCTFSGFSLSTSGMRVSWIRQPPGKALEWLARIDWDDDKFYSTSLKTRLTISKDTSKNQVVLTMTNMDPVDTATYYCARIPQRHSPGRLLYKNPGCFSVVLPPHLCRTG

SEQ ID NO: 673 - protein, 108 aa, Homo sapiens
ZIVLTZSPGTLSLSPGZRAALSCRASQSLSGNYLAWYQQKPGQAPRLLMYGVSSRATGIPDRFSGSGSGADFTLTISRLZPEDFAVYYCQQYGSSPFTFGQGSKLEIK

SEQ ID NO: 674 - protein, 500 aa, Homo sapiens
MASRLTLLTLLLLLLAGDRASSNPNATSSSSQDPESLQDRGEGKVATTVISKMLFVEPILEVSSLPTTNSTTNSATKITANTTDEPTTQPTTEPTTQPTIQPTQPTTQLPTDSPTQPTTGSFCPGPVTLCSDLESHSTEAVLGDALVDFSLKLYHAFSAMKKVETNMAFSPFSIASLLTQVLLGAGENTKTNLESILSYPKDFTCVHQALKGFTTKGVTSVSQIFHSPDLAIRDTFVNASRTLYSSSPRVLSNNSDANLELINTWVAKNTNNKISRLLDSLPSDTRLVLLNAIYLSAKWKTTFDPKKTRMEPFHFKNSVIKVPMMNSKKYPVAHFIDQTLKAKVGQLQLSHNLSLVILVPQNLKHRLEDMEQALSPSVFKAIMEKLEMSKFQPTLLTLPRIKVTTSQDMLSIMEKLEFFDFSYDLNLCGLTEDPDLQVSAMQHQTVLELTETGVEAAAASAISVARTLLVFEVQQPFLFVLWDQQHKFPVFMGRVYDPRA

SEQ ID NO: 675 - protein, 436 aa, Homo sapiens
  MOD_RES (130)..(136): Any amino acid
MESNAIIEWNRHRMESNAIIIKWNRMESNGVEWNHHQMESSGIIEWIRVSVQTGNIWVLGCNESSLLTSFFVFGCTFPITSHSSNAKLCRPSTPSPLFCPPPPRLFAPPPAPPRLFTLRDFSPPVAAAFXXXXXXXSPRHFATRHRGFLLPRRRGFFPTAAFYRPSPRLFAHPPPRLFAPTAPRRFARRGFLRPRRRGFLPPPPTCRGYLPAAAFCTPATTTFCTPAAAAFCPPTSLFARRGFLPPPPPRLFPHRGFLPPVAAAFCPPAAAAFCPHRSSAFCPPRLFASPPPRLFTTPPHVPRSQPQSGHSTEVRAPTQLLGLLVLWLPGARCDIQMTQSPSSLSASVGDRVTITCRASQGISNNLNWYQQKPGKTPKLLIYAASSLQSGIPSRFSDSGSGTDYTLTISSLQPEDFATYYCQQSDSTSPTVLQVIT

SEQ ID NO: 676 - protein, 2692 aa, Homo sapiens
MMNNSGYSDAGLGLGDETDEMPSTEKDLAEDAPWKKIQQNTFTRWCNEHLKCVGKRLTDLQRDLSDGLRLIALLEVLSQKRMYRKFHPRPNFRQMKLENVSVALEFLEREHIKLVSIDSKAIVDGNLKLILGLIWTLILHYSISMPMWEDEDDEDARKQTPKQRLLGWIQNKVPQLPITNFNRDWQDGKALGALVDNCAPGLCPDWEAWDPNQPVENAREAMQQADDWLGVPQVIAPEEIVDPNVDEHSVMTYLSQFPKAKLKPGAPVRSKQLNPKKAIAYGPGIEPQGNTVLQPAHFTVQTVDAGVGEVLVYIEDPEGHTEEAKVVPNNDKDRTYAVSYVPKVAGLHKVTVLFAGQNIERSPFEVNVGMALGDANKVSARGPGLEPVGNVANKPTYFDIYTAGAGTGDVAVVIVDPQGRRDTVEVALEDKGDSTFRCTYRPAMEGPHTVHVAFAGAPITRSPFPVHVSEACNPNACRASGRGLQPKGVRVKEVADFKVFTKGAGSGELKVTVKGPKGTEEPVKVREAGDGVFECEYYPVVPGKYVVTITWGGYAIPRSPFEVQVSPEAGVQKVRAWGPGLETGQVGKSADFVVEAIGTEVGTLGFSIEGPSQAKIECDDKGDGSCDVRYWPTEPGEYAVHVICDDEDIRDSPFIAHILPAPPDCFPDKVKAFGPGLEPTGCIVDKPAEFTIDARAAGKGDLKLYAQDADGCPIDIKVIPNGDGTFRCSYVPTKPIKHTIIISWGGVNVPKSPFRVNVGEGSHPERVKVYGPGVEKTGLKANEPTYFTVDCSEAGQGDVSIGIKCAPGVVGPAEADIDFDIIKNDNDTFTVKYTPPGAGRYTIMVLFANQEIPASPFHIKVDPSHDASKVKAEGPGLNRTGVEVGKPTHFTVLTKGAGKAKLDVQFAGTAKGEVVRDFEIIDNHDYSYTVKYTAVQQGNMAVTVTYGGDPVPKSPFVVNVAPPLDLSKIKVQGLNSKVAVGQEQAFSVNTRGAGGQGQLDVRMTSPSRRPIPCKLEPGGGAEAQAVRYMPPEEGPYKVDITYDGHPVPGSPFAVEGVLPPDPSKVCAYGPGLKGGLVGTPAPFSIDTKGAGTGGLGLTVEGPCEAKIECQDNGDGSCAVSYLPTEPGEYTINILFAEAHIPGSPFKATIRPVFDPSKVRASGPGLERGKVGEAATFTVDCSEAGEAELTIEILSDAGVKAEVLIHNNADGTYHITYSPAFPGTYTITIKYGGHPVPKFPTRVHVQPAVDTSGVKVSGPGVEPHGVLREVTTEFTVDARSLTATGGNHVTARVLNPSGAKTDTYVTDNGDGTYRVQYTAYEEGVHLVEVLYDEVAVPKSPFRVGVTEGCDPTRVRAFGPGLEGGLVNKANRFTVETRGAGTGGLGLAIEGPSEAKMSCKDNKDGSCTVEYIPFTPGDYDVNITFGGRPIPGSPFRVPVKDVVDPGKVKCSGPGLGAGVRARVPQTFTVDCSQAGRAPLQVAVLGPTGVAEPVEVRDNGDGTHTVHYTPATDGPYTVAVKYADQEVPRSPFKIKVLPAHDASKVRASGPGLNASGIPASLPVEFTIDARDAGEGLLTVQILDPEGKPKKANIRDNGDGTYTVSYLPDMSGRYTITIKYGGDEIPYSPFRIHALPTGDASKCLVTVSIGGHGLGACLGPRIQIGQETVITVDAKAAGEGKVTCTVSTPDGAELDVDVVENHDGTFDIYYTAPEPGKYVITIRFGGEHIPNSPFHVLATEEPVVPVEPMESMLRPFNLVIPFAVQKGELTGEVRMPSGKTARPNITDNKDGTITVRYAPTEKGLHQMGIKYDGNHIPGSPLQFYVDAINSRHVSAYGPGLSHGMVNKPATFTIVTKDAGEGGLSLAVEGPSKAEITCKDNKDGTCTVSYLPTAPGDYSIIVRFDDKHIPGSPFTAKITGDDSMRTSQLNVGTSTDVSLKITESDLSQLTASIRAPSGNEEPCLLKRLPNRHIGISFTPKEVGEHVVSVRKSGKHVTNSPFKILVGPSEIGDASKVRVWGKGLSEGHTFQVAEFIVDTRNAGYGGLGLSIEGPSKVDINCEDMEDGTCKVTYCPTEPGTYIINIKFADKHVPGSPFTVKVTGEGRMKESITRRRQAPSIATIGSTCDLNLKIPGNWFQMVSAQERLTRTFTRSSHTYTRTERTEISKTRGGETKREVRVEESTQVGGDPFPAVFGDFLGRERLGSFGSITRQQEGEASSQDMTAQVTSPSGKVEAAEIVEGEDSAYSVRFVPQEMGPHTVAVKYRGQHVPGSPFQFTVGPLGEGGAHKVRAGGTGLERGVAGVPAEFSIWTREAGAGGLSIAVEGPSKAEIAFEDRKDGSCGVSYVVQEPGDYEVSIKFNDEHIPDSPFVVPVASLSDDARRLTVTSLQETGLKVNQPASFAVQLNGARGVIDARVHTPSGAVEECYVSELDSDKHTIRFIPHENGVHSIDVKFNGAHIPGSPFKIRVGEQSQAGDPGLVSAYGPGLEGGTTGVSSEFIVNTLNAGSGALSVTIDGPSKVQLDCRECPEGHVVTYTPMAPGNYLIAIKYGGPQHIVGSPFKAKVTGPRLSGGHSLHETSTVLVETVTKSSSSRGSSYSSIPKFSSDASKVVTRGPGLSQAFVGQKNSFTVDCSKAGTNMMMVGVHGPKTPCEEVYVKHMGNRVYNVTYTVKEKGDYILIVKWGDESVPGSPFKVKVP

SEQ ID NO: 677 - protein, 123 aa, Homo sapiens
MRAPTQLLGLLVLWLPGARCDIQMTQSPSSLSASVGDRVTITCRASQGISNNLNWYQQKPGKTPKLLIYAASSLQSGIPSRFSDSGSGADYTLTIRSLQPEDFATYYCQQSDSTPPTALQVIT

SEQ ID NO: 678 - protein, 2856 aa, Homo sapiens
MEEKQQIILANQDGGTVAGAAPTFFVILKQPGNGKTDQGILVTNQDACALASSVSSPVKSKGKICLPADCTVGGITVTLDNNSMWNEFYHRSTEMILTKQGRRMFPYCRYWITGLDSNLKYILVMDISPVDNHRYKWNGRWWEPSGKAEPHVLGRVFIHPESPSTGHYWMHQPVSFYKLKLTNNTLDQEGHIILHSMHRYLPRLHLVPAEKAVEVIQLNGPGVHTFTFPQTEFFAVTAYQNIQITQLKIDYNPFAKGFRDDGLNNKPQRDGKQKNSSDQEGNNISSSSGHRVRLTEGQGSEIQPGDLDPLSRGHETSGKGLEKTSLNIKRDFLGFMDTDSALSEVPQLKQEISECLIASSFEDDSRVASPLDQNGSFNVVIKEEPLDDYDYELGECPEGVTVKQEETDEETDVYSNSDDDPILEKQLKRHNKVDNPEADHLSSKWLPSSPSGVAKAKMFKLDTGKMPVVYLEPCAVTRSTVKISELPDNMLSTSRKDKSSMLAELEYLPTYIENSNETAFCLGKESENGLRKHSPDLRVVQKYPLLKEPQWKYPDISDSISTERILDDSKDSVGDSLSGKEDLGRKRTTMLKIATAAKVVNANQNASPNVPGKRGRPRKLKLCKAGRPPKNTGKSLISTKNTPVSPGSTFPDVKPDLEDVDGVLFVSFESKEALDIHAVDGTTEESSSLQASTTNDSGYRARISQLEKELIEDLKTLRHKQVIHPGLQEVGLKLNSVDPTMSIDLKYLGVQLPLAPATSFPFWNLTGTNPASPDAGFPFVSRTGKTNDFTKIKGWRGKFHSASASRNEGGNSESSLKNRSAFCSDKLDEYLENEGKLMETSMGFSSNAPTSPVVYQLPTKSTSYVRTLDSVLKKQSTISPSTSYSLKPHSVPPVSRKAKSQNRQATFSGRTKSSYKSILPYPVSPKQKYSHVILGDKVTKNSSGIISENQANNFVVPTLDENIFPKQISLRQAQQQQQQQQGSRPPGLSKSQVKLMDLEDCALWEGKPRTYITEERADVSLTTLLTAQASLKTKPIHTIIRKRAPPCNNDFCRLGCVCSSLALEKRQPAHCRRPDCMFGCTCLKRKVVLVKGGSKTKHFQRKAAHRDPVFYDTLGEEAREEEEGIREEEEQLKEKKKRKKLEYTICETEPEQPVRHYPLWVKVEGEVDPEPVYIPTPSVIEPMKPLLLPQPEVLSPTVKGKLLTGIKSPRSYTPKPNPVIREEDKDPVYLYFESMMTCARVRVYERKKEDQRQPSSSSSPSPSFQQQTSCHSSPENHNNAKEPDSEQQPLKQLTCDLEDDSDKLQEKSWKSSCNEGESSSTSYMHQRSPGGPTKLIEIISDCNWEEDRNKILSILSQHINSNMPQSLKVGSFIIELASQRKSRGEKNPPVYSSRVKISMPSCQDQDDMAEKSGSETPDGPLSPGKMEDISPVQTDALDSVRERLHGGKGLPFYAGLSPAGKLVAYKRKPSSSTSGLIQVASNAKVAASRKPRTLLPSTSNSKMASSSGTATNRPGKNLKAFVPAKRPIENAAQIPVATPQVSPNTVKRAGPRLLLIPVQQGSPTLRPVSNTQLQGHRMVLQPVRSPSGMNLFRHPNGQIVQLLPLHQLRGSNTQPNLQPVMFRNPGSVMGIRLPAPSKPSETPPSSTSSSAFSVMNPVIQAVGSSSAVNVITQAPSLLSSGASFVSQAGTLTLRISPPEPQSFASKTGSETKITYSSGGQPVGTASLIPLQSGSFALLQLPGQKPVPSSILQHVASLQMKRESQNPDQKDETNSIKREQETKKVLQSEGEAVDPEANVIKQNSGAATSEETLNDSLEDRGDHLDEECLPEEGCATVKPSEHSCITGSHTDQDYKDVNEEYGARNRKSSKEKVAVLEVRTISEKASNKTVQNLSKVQHQKLGDVKVEQQKGFDNPEENSSEFPVTFKEESKFELSGSKVMEQQSNLQPEAKEKECGDSLEKDRERWRKHLKGPLTRKCVGASQECKKEADEQLIKETKTCQENSDVFQQEQGISDLLGKSGITEDARVLKTECDSWSRISNPSAFSIVPRRAAKSSRGNGHFQGHLLLPGEQIQPKQEKKGGRSSADFTVLDLEEDDEDDNEKTDDSIDEIVDVVSDYQSEEVDDVEKNNCVEYIEDDEEHVDIETVEELSEEINVAHLKTTAAHTQSFKQPSCTHISADEKAAERSRKAPPIPLKLKPDYWSDKLQKEAEAFAYYRRTHTANERRRRGEMRDLFEKLKITLGLLHSSKVSKSLILTRAFSEIQGLTDQADKLIGQKNLLTRKRNILIRKVSSLSGKTEEVVLKKLEYIYAKQQALEAQKRKKKMGSDEFDISPRISKQQEGSSASSVDLGQMFINNRRGKPLILSRKKDQATENTSPLNTPHTSANLVMTPQGQLLTLKGPLFSGPVVAVSPDLLESDLKPQVAGSAVALPENDDLFMMPRIVNVTSLATEGGLVDMGGSKYPHEVPDSKPSDHLKDTVRNEDNSLEDKGRISSRGNRDGRVTLGPTQVFLANKDSGYPQIVDVSNMQKAQEFLPKKISGDMRGIQYKWKESESRGERVKSKDSSFHKLKMKDLKDSSIEMELRKVTSAIEEAALDSSELLTNMEDEDDTDETLTSLLNEIAFLNQQLNDDSVGLAELPSSMDTEFPGDARRAFISKVPPGSRATFQVEHLGTGLKELPDVQGESDSISPLLLHLEDDDFSENEKQLAEPASEPDVLKIVIDSEIKDSLLSNKKAIDGGKNTSGLPAEPESVSSPPTLHMKTGLENSNSTDTLWRPMPKLAPLGLKVANPSSDADGQSLKVMPCLAPIAAKVGSVGHKMNLTGNDQEGRESKVMPTLAPVVAKLGNSGASPSSAGK

SEQ ID NO: 679 - protein, 2843 aa, Homo sapiens
MAAASYDQLLKQVEALKMENSNLRQELEDNSNHLTKLETEASNMKEVLKQLQGSIEDEAMASSGQIDLLERLKELNLDSSNFPGVKLRSKMSLRSYGSREGSVSSRSGECSPVPMGSFPRRGFVNGSRESTGYLEELEKERSLLLADLDKEEKEKDWYYAQLQNLTKRIDSLPLTENFSLQTDMTRRQLEYEARQIRVAMEEQLGTCQDMEKRAQRRIARIQQIEKDILRIRQLLQSQATEAERSSQNKHETGSHDAERQNEGQGVGEINMATSGNGQGSTTRMDHETASVLSSSSTHSAPRRLTSHLGTKVEMVYSLLSMLGTHDKDDMSRTLLAMSSSQDSCISMRQSGCLPLLIQLLHGNDKDSVLLGNSRGSKEARARASAALHNIIHSQPDDKRGRREIRVLHLLEQIRAYCETCWEWQEAHEPGMDQDKNPMPAPVEHQICPAVCVLMKLSFDEEHRHAMNELGGLQAIAELLQVDCEMYGLTNDHYSITLRRYAGMALTNLTFGDVANKATLCSMKGCMRALVAQLKSESEDLQQVIASVLRNLSWRADVNSKKTLREVGSVKALMECALEVKKESTLKSVLSALWNLSAHCTENKADICAVDGALAFLVGTLTYRSQTNTLAIIESGGGILRNVSSLIATNEDHRQILRENNCLQTLLQHLKSHSLTIVSNACGTLWNLSARNPKDQEALWDMGAVSMLKNLIHSKHKMIAMGSAAALRNLMANRPAKYKDANIMSPGSSLPSLHVRKQKALEAELDAQHLSETFDNIDNLSPKASHRSKQRHKQSLYGDYVFDTNRHDDNRSDNFNTGNMTVLSPYLNTTVLPSSSSSRGSLDSSRSEKDRSLERERGIGLGNYHPATENPGTSSKRGLQISTTAAQIAKVMEEVSAIHTSQEDRSSGSTTELHCVTDERNALRRSSAAHTHSNTYNFTKSENSNRTCSMPYAKLEYKRSSNDSLNSVSSSDGYGKRGQMKPSIESYSEDDESKFCSYGQYPADLAHKIHSANHMDDNDGELDTPINYSLKYSDEQLNSGRQSPSQNERWARPKHIIEDEIKQSEQRQSRNQSTTYPVYTESTDDKHLKFQPHFGQQECVSPYRSRGANGSETNRVGSNHGINQNVSQSLCQEDDYEDDKPTNYSERYSEEEQHEEEERPTNYSIKYNEEKRHVDQPIDYSLKYATDIPSSQKQSFSFSKSSSGQSSKTEHMSSSSENTSTPSSNAKRQNQLHPSSAQSRSGQPQKAATCKVSSINQETIQTYCVEDTPICFSRCSSLSSLSSAEDEIGCNQTTQEADSANTLQIAEIKEKIGTRSAEDPVSEVPAVSQHPRTKSSRLQGSSLSSESARHKAVEFSSGAKSPSKSGAQTPKSPPEHYVQETPLMFSRCTSVSSLDSFESRSIASSVQSEPCSGMVSGIISPSDLPDSPGQTMPPSRSKTPPPPPQTAQTKREVPKNKAPTAEKRESGPKQAAVNAAVQRVQVLPDADTLLHFATESTPDGFSCSSSLSALSLDEPFIQKDVELRIMPPVQENDNGNETESEQPKESNENQEKEAEKTIDSEKDLLDDSDDDDIEILEECIISAMPTKSSRKAKKPAQTASKLPPPVARKPSQLPVYKLLPSQNRLQPQKHVSFTPGDDMPRVYCVEGTPINFSTATSLSDLTIESPPNELAAGEGVRGGAQSGEFEKRDTIPTEGRSTDEAQGGKTSSVTIPELDDNKAEEGDILAECINSAMPKGKSHKPFRVKKIMDQVQQASASSSAPNKNQLDGKKKKPTSPVKPIPQNTEYRTRVRKNADSKNNLNAERVFSDNKDSKKQNLKNNSKVFNDKLPNNEDRVRGSFAFDSPHHYTPIEGTPYCFSRNDSLSSLDFDDDDVDLSREKAELRKAKENKESEAKVTSHTELTSNQQSANKTQAIAKQPINRGQPKPILQKQSTFPQSSKDIPDRGAATDEKLQNFAIENTPVCFSHNSSLSSLSDIDQENNNKENEPIKETEPPDSQGEPSKPQASGYAPKSFHVEDTPVCFSRNSSLSSLSIDSEDDLLQECISSAMPKKKKPSRLKGDNEKHSPRNMGGILGEDLTLDLKDIQRPDSEHGLSPDSENFDWKAIQEGANSIVSSLHQAAAAACLSRQASSDSDSILSLKSGISLGSPFHLTPDQEEKPFTSNKGPRILKPGEKSTLETKKIESESKGIKGGKKVYKSLITGKVRSNSEISGQMKQPLQANMPSISRGRTMIHIPGVRNSSSSTSPVSKKGPPLKTPASKSPSEGQTATTSPRGAKPSVKSELSPVARQTSQIGGSSKAPSRSGSRDSTPSRPAQQPLSRPIQSPGRNSISPGRNGISPPNKLSQLPRTSSPSTASTKSSGSGKMSYTSPGRQMSQQNLTKQTGLSKNASSIPRSESASKGLNQMNNGNGANKKVELSRMSSTKSSGSESDRSERPVLVRQSTFIKEAPSPTLRRKLEESASFESLSPSSRPASPTRSQAQTPVLSPSLPDMSLSTHSSVQAGGWRKLPPNLSPTIEYNDGRPAKRHDIARSHSESPSRLPINRSGTWKREHSKHSSSLPRVSTWRRTGSSSSILSASSESSEKAKSEDEKHVNSISGTKQSKENQVSAKGTWRKIKENEFSPTNSTSQTVSSGATNGAESKTLIYQMAPAVSKTEDVWVRIEDCPINNPRSGRSPTGNTPPVIDSVSEKANPNIKDSKDNQAKQNVGNGSVPMRTVGLENRLNSFIQVDAPDQKGTEIKPGQNNPVPVSETNESSIVERTPFSSSSSSKHSSPSGTVAARVTPFNYNPSPRKSSADSTSARPSQIPTPVNNNTKKRDSKTDSTESSGTQSPKRHSGSYLVTSV

SEQ ID NO: 680 - protein, 352 aa, Homo sapiens
MRSLGALLLLLSACLAVSAGPVPTPPDNIQVQENFNISRIYGKWYNLAIGSTCPWLKKIMDRMTVSTLVLGEGATEAEISMTSTRWRKGVCEETSGAYEKTDTDGKFLYHKSKWNITMESYVVHTNYDEYAIFLTKKFSRHHGPTITAKLYGRAPQLRETLLQDFRVVAQGVGIPEDSIFTMADRGECVPGEQEPEPILIPRVRRAVLPQEEEGSGGGQLVTEVTKKEDSCQLGYSAGPCMGMTSRYFYNGTSMACETFQYGGCMGNGNNFVTEKECLQTCRTVAACNLPIVRGPCRAFIQLWAFDAVKGKCVLFPYGGCQGNGNKFYSEKECREYCGVPGDGDEELLRFSN

SEQ ID NO: 681 - protein, 4574 aa, Homo sapiens
MSGEDAEVRAVSEDVSNGSSGSPSPGDTLPWNLGKTQRSRRSGGGAGSNGSVLDPAERAVIRIADERDRVQKKTFTKWVNKHLIKAQRHISDLYEDLRDGHNLISLLEVLSGDSLPREKGRMRFHKLQNVQIALDYLRHRQVKLVNIRNDDIADGNPKLTLGLIWTIILHFQISDIQVSGQSEDMTAKEKLLLWSQRMVEGYQGLRCDNFTSSWRDGRLFNAIIHRHKPLLIDMNKVYRQTNLENLDQAFSVAERDLGVTRLLDPEDVDVPQPDEKSIITYVSSLYDAMPRVPDVQDGVRANELQLRWQEYRELVLLLLQWMRHHTAAFEERRFPSSFEEIEILWSQFLKFKEMELPAKEADKNRSKGIYQSLEGAVQAGQLKVPPGYHPLDVEKEWGKLHVAILEREKQLRSEFERLECLQRIVTKLQMEAGLCEEQLNQADALLQSDVRLLAAGKVPQRAGEVERDLDKADSMIRLLFNDVQTLKDGRHPQGEQMYRRVYRLHERLVAIRTEYNLRLKAGVAAPATQVAQVTLQSVQRRPELEDSTLRYLQDLLAWVEENQHRVDGAEWGVDLPSVEAQLGSHRGLHQSIEEFRAKIERARSDEGQLSPATRGAYRDCLGRLDLQYAKLLNSSKARLRSLESLHSFVAAATKELMWLNEKEEEEVGFDWSDRNTNMTAKKESYSALMRELELKEKKIKELQNAGDRLLREDHPARPTVESFQAALQTQWSWMLQLCCCIEAHLKENAAYFQFFSDVREAEGQLQKLQEALRRKYSCDRSATVTRLEDLLQDAQDEKEQLNEYKGHLSGLAKRAKAVVQLKPRHPAHPMRGRLPLLAVCDYKQVEVTVHKGDECQLVGPAQPSHWKVLSSSGSEAAVPSVCFLVPPPNQEAQEAVTRLEAQHQALVTLWHQLHVDMKSLLAWQSLRRDVQLIRSWSLATFRTLKPEEQRQALHSLELHYQAFLRDSQDAGGFGPEDRLMAEREYGSCSHHYQQLLQSLEQGAQEESRCQRCISELKDIRLQLEACETRTVHRLRLPLDKEPARECAQRIAEQQKAQAEVEGLGKGVARLSAEAEKVLALPEPSPAAPTLRSELELTLGKLEQVRSLSAIYLEKLKTISLVIRGTQGAEEVLRAHEEQLKEAQAVPATLPELEATKASLKKLRAQAEAQQPTFDALRDELRGAQEVGERLQQRHGERDVEVERWRERVAQLLERWQAVLAQTDVRQRELEQLGRQLRYYRESADPLGAWLQDARRRQEQIQAMPLADSQAVREQLRQEQALLEEIERHGEKVEECQRFAKQYINAIKDYELQLVTYKAQLEPVASPAKKPKVQSGSESVIQEYVDLRTHYSELTTLTSQYIKFISETLRRMEEEERLAEQQRAEERERLAEVEAALEKQRQLAEAHAQAKAQAEREAKELQQRMQEEVVRREEAAVDAQQQKRSIQEELQQLRQSSEAEIQAKARQAEAAERSRLRIEEEIRVVRLQLEATERQRGGAEGELQALRARAEEAEAQKRQAQEEAERLRRQVQDESQRKRQAEVELASRVKAEAEAAREKQRALQALEELRLQAEEAERRLRQAEVERARQVQVALETAQRSAEAELQSKRASFAEKTAQLERSLQEEHVAVAQLREEAERRAQQQAEAERAREEAERELERWQLKANEALRLRLQAEEVAQQKSLAQAEAEKQKEEAEREARRRGKAEEQAVRQRELAEQELEKQRQLAEGTAQQRLAAEQELIRLRAETEQGEQQRQLLEEELARLQREAAAATQKRQELEAELAKVRAEMEVLLASKARAEEESRSTSEKSKQRLEAEAGRFRELAEEAARLRALAEEAKRQRQLAEEDAARQRAEAERVLAEKLAAIGEATRLKTEAEIALKEKEAENERLRRLAEDEAFQRRRLEEQAAQHKADIEERLAQLRKASDSELERQKGLVEDTLRQRRQVEEEILALKASFEKAAAGKAELELELGRIRSNAEDTLRSKEQAELEAARQRQLAAEEERRRREAEERVQKSLAAEEEAARQRKAALEEVERLKAKVEEARRLRERAEQESARQLQLAQEAAQKRLQAEEKAHAFAVQQKEQELQQTLQQEQSVLDQLRGEAEAARRAAEEAEEARVQAEREAAQSRRQVEEAERLKQSAEEQAQARAQAQAAAEKLRKEAEQEAARRAQAEQAALRQKQAADAEMEKHKKFAEQTLRQKAQVEQELTTLRLQLEETDHQKNLLDEELQRLKAEATEAARQRSQVEEELFSVRVQMEELSKLKARIEAENRALILRDKDNTQRFLQEEAEKMKQVAEEAARLSVAAQEAARLRQLAEEDLAQQRALAEKMLKEKMQAVQEATRLKAEAELLQQQKELAQEQARRLQEDKEQMAQQLAEETQGFQRTLEAERQRQLEMSAEAERLKLRVAEMSRAQARAEEDAQRFRKQAEEIGEKLHRTELATQEKVTLVQTLEIQRQQSDHDAERLREAIAELEREKEKLQQEAKLLQLKSEEMQTVQQEQLLQETQALQQSFLSEKDSLLQRERFIEQEKAKLEQLFQDEVAKAQQLREEQQRQQQQMEQERQRLVASMEEARRRQHEAEEGVRRKQEELQQLEQQRRQQEELLAEENQRLREQLQLLEEQHRAALAHSEEVTASQVAATKTLPNGRDALDGPAAEAEPEHSFDGLRRKVSAQRLQEAGILSAEELQRLAQGHTTVDELARREDVRHYLQGRSSIAGLLLKATNEKLSVYAALQRQLLSPGTALILLEAQAASGFLLDPVRNRRLTVNEAVKEGVVGPELHHKLLSAERAVTGYKDPYTGQQISLFQAMQKGLIVREHGIRLLEAQIATGGVIDPVHSHRVPVDVAYRRGYFDEEMNRVLADPSDDTKGFFDPNTHENLTYLQLLERCVEDPETGLCLLPLTDKAAKGGELVYTDSEARDVFEKATVSAPFGKFQGKTVTIWEIINSEYFTAEQRRDLLRQFRTGRITVEKIIKIIITVVEEQEQKGRLCFEGLRSLVPAAELLESRVIDRELYQQLQRGERSVRDVAEVDTVRRALRGANVIAGVWLEEAGQKLSIYNALKKDLLPSDMAVALLEAQAGTGHIIDPATSARLTVDEAVRAGLVGPEFHEKLLSAEKAVTGYRDPYTGQSVSLFQALKKGLIPREQGLRLLDAQLSTGGIVDPSKSHRVPLDVACARGCLDEETSRALSAPRADAKAYSDPSTGEPATYGELQQRCRPDQLTGLSLLPLSEKAARARQEELYSELQARETFEKTPVEVPVGGFKGRTVTVWELISSEYFTAEQRQELLRQFRTGKVTVEKVIKILITIVEEVETLRQERLSFSGLRAPVPASELLASGVLSRAQFEQLKDGKTTVKDLSELGSVRTLLQGSGCLAGIYLEDTKEKVSIYEAMRRGLLRATTAALLLEAQAATGFLVDPVRNQRLYVHEAVKAGVVGPELHEQLLSAEKAVTGYRDPYSGSTISLFQAMQKGLVLRQHGIRLLEAQIATGGIIDPVHSHRVPVDVAYQRGYFSEEMNRVLADPSDDTKGFFDPNTHENLTYRQLLERCVEDPETGLRLLPLKGAEKAEVVETTQVYTEEETRRAFEETQIDIPGGGSHGGSTMSLWEVMQSDLIPEEQRAQLMADFQAGRVTKERMIIIIIEIIEKTEIIRQQGLASYDYVRRRLTAEDLFEARIISLETYNLLREGTRSLREALEAESAWCYLYGTGSVAGVYLPGSRQTLSIYQALKKGLLSAEVARLLLEAQAATGFLLDPVKGERLTVDEAVRKGLVGPELHDRLLSAERAVTGYRDPYTEQTISLFQAMKKELIPTEEALRLLDAQLATGGIVDPRLGFHLPLEVAYQRGYLNKDTHDQLSEPSEVRSYVDPSTDERLSYTQLLRRCRRDDGTGQLLLPLSDARKLTFRGLRKQITMEELVRSQVMDEATALQLREGLTSIEEVTKNLQKFLEGTSCIAGVFVDATKERLSVYQAMKKGIIRPGTAFELLEAQAATGYVIDPIKGLKLTVEEAVRMGIVGPEFKDKLLSAERAVTGYKDPYSGKLISLFQAMKKGLILKDHGIRLLEAQIATGGIIDPEESHRLPVEVAYKRGLFDEEMNEILTDPSDDTKGFFDPNTEENLTYLQLMERCITDPQTGLCLLPLKEKKRERKTSSKSSVRKRRVVIVDPETGKEMSVYEAYRKGLIDHQTYLELSEQECEWEEITISSSDGVVKSMIIDRRSGRQYDIDDAIAKNLIDRSALDQYRAGTLSITEFADMLSGNAGGFRSRSSSVGSSSSYPISPAVSRTQLASWSDPTEETGPVAGILDTETLEKVSITEAMHRNLVDNITGQRLLEAQACTGGIIDPSTGERFPVTDAVNKGLVDKIMVDRINLAQKAFCGFEDPRTKTKMSAAQALKKGWLYYEAGQRFLEVQYLTGGLIEPDTPGRVPLDEALQRGTVDARTAQKLRDVGAYSKYLTCPKTKLKISYKDALDRSMVEEGTGLRLLEAAAQSTKGYYSPYSVSGSGSTAGSRTGSRTGSRAGSRRGSFDATGSGFSMTFSSSSYSSSGYGRRYASGSSASLGGPESAVA

SEQ ID NO: 682 - protein, 2970 aa, Homo sapiens [sequence omitted]

SEQ ID NO: 683 - protein, 202 aa, Homo sapiens [sequence omitted]

SEQ ID NO: 684 - protein, 108 aa, Homo sapiens
DIQMTQSPSTLSASVGDRVTITCRASQSINTWLAWYQQKPGKAPKLLMYKASSLESGVPSRFIGSGSGTEFTLTISSLQPDDFATYYCQQYNSDSKMFGQGTKVEVKG

SEQ ID NO: 685 - protein, 115 aa, Homo sapiens
MEAPAQLLFLLLLWLPDTTGEIVLTQSPATLSLSPGERATLSCRASQSVSSYLAWYQQKPGQAPRLLIYDASNRATGIPARFSGSGSGTDFTLTISSLEPEDFAVYYCQQRSNWP

SEQ ID NO: 686 - protein, 373 aa, Homo sapiens
MTSKGPEEEHPSVTLFRQYLRIRTVQPKPDYGTNPTLSSILLNSHTDVVPVFKEHWSHDPFEAFKDSEGYIYARGAQDMKCVSIQYLEAVRRLKVEGHRFPRTIHMTFVPDEEVGGHQGMELFVQRPEFHALRAGFALDEGIANPTDAFTVFYSERSPWWVRVTSTGRPGHASRFMEDTAAEKLHKVVNSILAFREKEWQRLQSNPHLKEGSVTSVNLTKLEGGVAYNVIPATMSASFDFRVAPDVDFKAFEEQLQSWCQAAGEGVTLEFAQKWMHPQVTPTDDSNPWWAAFSRVCKDMNLTLEPEIMPAATDNRYIRAVGVPALGFSPMNRTPVLLHDHDERLHEAVFLRGVDIYTRLLPALASVPALPSDS

SEQ ID NO: 687 - protein, 4307 aa, Homo sapiens
MANGTADVRKLFIFTTTQNYFGLMSELWDQPLLCNCLEINNFLDDGNQMLLRVQRSDAGISFSNTIEFGDTKDKVLVFFKLRPEVITDENLHDNILVSSMLESPISSLYQAVRQVFAPMLLKDQEWSRNFDPKLQNLLSELEAGLGIVLRRSDTNLTKLKFKEDDTRGILTPSDEFQFWIEQAHRGNKQISKERANYFKELFETIAREFYNLDSLSLLEVVDLVETTQDVVDDVWRQTEHDHYPESRMLHLLDIIGGSFGRFVQKKLGTLNLWEDPYYLVKESLKAGISICEQWVIVCNHLTGQVWQRYVPHPWKNEKYFPETLDKLGKRLEEVLAIRTIHEKFLYFLPASEEKIICLTRVFEPFTGLNPVQYNPYTEPLWKAAVSQYEKIIAPAEQKIAGKLKNYISEIQDSPQQLLQAFLKYKELVKRPTISKELMLERETLLARLVDSIKDFRLDFENRCRGIPGDASGPLSGKNLSEVVNSIVWVRQLELKVDDTIKIAEALLSDLPGFRCFHQSAKDLLDQLKLYEQEQFDDWSRDIQSGLSDSRSGLCIEASSRIMELDSNDGLLKVHYSDRLVILLREVRQLSALGFVIPAKIQQVANIAQKFCKQAIILKQVAHFYNSIDQQMIQSQRPMMLQSALAFEQIIKNSKAGSGGKSQITWDNPKELEGYIQKLQNAAERLATENRKLRKWHTTFCEKVVVLMNIDLLRQQQRWKDGLQELRTGLATVEAQGFQASDMHAWKQHWNHQLYKALEHQYQMGLEALNENLPEINIDLTYKQGRLQFRPPFEEIRAKYYREMKRFIGIPNQFKGVGEAGDESIFSIMIDRNASGFLTIFSKAEDLFRRLSAVLHQHKEWIVIGQVDMEALVEKHLFTVHDWEKNFKALKIKGKEVERLPSAVKVDCLNINCNPVKTVIDDLIQKLFDLLVLSLKKSIQAHLHEIDTFVTEAMEVLTIMPQSVEEIGDANLQYSKLQERKPEILPLFQEAEDKNRLLRTVAGGGLETISNLKAKWDKFELMMESHQLMIKDQIEVMKGNVKSRLQIYYQELEKFKARWDQLKPGDDVIETGQHNTLDKSAKLIKEKKIEFDDLEVTRKKLVDDCHHFRLEEPNFSLASSISKDIESCAQIWAFYEEFQQGFQEMANEDWITFRTKTYLFEEFLMNWHDRLRKVEEHSVMTVKLQSEVDKYKIVIPILKYVRGEHLSPDHWLDLFRLLGLPRGTSLEKLLFGDLLRVADTIVAKAADLKDLNSRAQGEVTIREALRELDLWGVGAVFTLIDYEDSQSRTMKLIKDWKDIVNQVGDNRCLLQSLKDSPYYKGFEDKVSIWERKLAELDEYLQNLNHIQRKWVYLEPIFGRGALPKEQTRFNRVDEDFRSIMTDIKKDNRVTTLTTHAGIRNSLLTILDQLQRCQKSLNEFLEEKRSAFPRFYFIGDDDLLEILGQSTNPSVIQSHLKKLFAGINSVCFDEKSKHITAMKSLEGEVVPFKNKVPLSNNVETWLNDLALEMKKTLEQLLKECVTTGRSSQGAVDPSLFPSQILCLAEQIKFTEDVENAIKDHSLHQIETQLVNKLEQYTNIDTSSEDPGNTESGILELKLKALILDIIHNIDVVKQLNQIQVHTTEDWAWKKQLRFYMKSDHTCCVQMVDSEFQYTYEYQGNASKLVYTPLTDKCYLTLTQAMKMGLGGNPYGPAGTGKTESVKALGGLLGRQVLVFNCDEGIDVKSMGRIFVGLVKCGAWGCFDEFNRLEESVLSAVSMQIQTIQDALKNHRTVCELLGKEVEVNSNSGIFITMNPAGKGYGGRQKLPDNLKQLFRPVAMSHPDNELIAEVILYSEGFKDAKVLSRKLVAIFNLSRELLTPQQHYDWGLRALKTVLRGSGNLLRQLNKSGTTQNANESHIVVQALRLNTMSKFTFTDCTRFDALIKDVFPGIELKEVEYDELSAALKQVFEEANYEIIPNQIKKALELYEQLCQRMGVVIVGPSGAGKSTLWRMLRAALCKTGKVVKQYTMNPKAMPRYQLLGHIDMDTREWSDGVLTNSARQVVREPQDVSSWIICDGDIDPEWIESLNSVLDDNRLLTMPSGERIQFGPNVNFVFETHDLSCASPATISRMGMIFLSDEETDLNSLIKSWLRNQPAEYRNNLENWIGDYFEKALQWVLKQNDYVVETSLVGTVMNGLSHLHGCRDHDEFIINLIRGLGGNLNMKSRLEFTKEVFHWARESPPDFHKPMDTYYDSTRGRLATYVLKKPEDLTADDFSNGLTLPVIQTPDMQRGLDYFKPWLSSDTKQPFILVGPEGCGKGMLLRYAFSQLRSTQIATVHCSAQTTSRHLLQKLSQTCMVISTNTGRVYRPKDCERLVLYLKDINLPKLDKWGTSTLVAFLQQVLTYQGFYDENLEWVGLENIQIVASMSAGGRLGRHKLTTRFTSIVRLCSIDYPEREQLQTIYGAYLEPVLHKNLKNHSIWGSSSKIYLLAGSMVQVYEQVRAKFTVDDYSHYFFTPCILTQWVLGLFRYDLEGGSSNHPLDYVLEIVAYEARRLFRDKIVGAKELHLFDIILTSVFQGDWGSDILDNMSDSFYVTWGARHNSGARAAPGQPLPPHGKPLGKLNSTDLKDVIKKGLIHYGRDNQNLDILLFHEVLEYMSRIDRVLSFPGGSLLLAGRSGVGRRTITSLVSHMHGAVLFSPKISRGYELKQFKNDLKHVLQLAGIEAQQVVLLLEDYQFVHPTFLEMINSLLSSGEVPGLYTLEELEPLLLPLKDQASQDGFFGPVFNYFTYRIQQNLHIVLIMDSANSNFMINCESNPALHKKCQVLWMEGWSNSSMKKIPEMLFSETGGGEKYNDKKRKEEKKKNSVDPDFLKSFLLIHESCKAYGATPSRYMTFLHVYSAISSSKKKELLKRQSHLQAGVSKLNEAKALVDELNRKAGEQSVLLKTKQDEADAALQMITVSMQDASEQKTELERLKHRIAEEVVKIEERKNKIDDELKEVQPLVNEAKLAVGNIKPESLSEIRSLRMPPDVIRDILEGVLRLMGIFDTSWVSMKSFLAKRGVREDIATFDARNISKEIRESVEELLFKNKGSFDPKNAKRASTAAAPLAAWVKANIQYSHVLERIHPLETEQAGLESNLKKTEDRKRKLEELLNSVGQKVSELKEKFQSRTSEAAKLEAEVSKAQETIKAAEVLINQLDREHKRWNAQVVEITEELATLPKRAQLAAAFITYLSAAPESLRKTCLEEWTKSAGLEKFDLRRFLCTESEQLIWKSEGLPSDDLSIENALVILQSRVCPFLIDPSSQATEWLKTHLKDSRLEVINQQDSNFITALELAVRFGKTLIIQEMDGVEPVLYPLLRRDLVAQGPRYVVQIGDKIIDYNEEFRLFLSTRNPNPFIPPDAASIVTEVNFTTTRSGLRGQLLALTIQHEKPDLEEQKTKLLQQEEDKKIQLAKLEESLLETLATSQGNILENKDLIESLNQTKASSALIQESLKESYKLQISLDQERDAYLPLAESASKMYFIISDLSKINNMYRFSLAAFLRLFQRALQNKQDSENTEQRIQSLISSLQHMVYEYICRCLFKADQLMFALHFVRGMHPELFQENEWDTFTGVVVGDMLRKADSQQKIRDQLPSWIDQERSWAVATLKIALPSLYQTLCFEDAALWRTYYNNSMCEQEFPSILAKKVSLFQQILVVQALRPDRLQSAMALFACKTLGLKEVSPLPLNLKRLYKETLEIEPILIIISPGADPSQELQELANAERSGECYHQVAMGQGQADLAIQMLKECARNGDWLCLKNLHLVVSWLPVLEKELNTLQPKDTFRLWLTAEVHPNFTPILLQSSLKITYESPPGLKKNLMRTYESWTPEQISKKDNTHRAHALFSLAWFHAACQERRNYIPQGWTKFYEFSLSDLRAGYNIIDRLFDGAKDVQWEFVHGLLENAIYGGRIDNYFDLRVLQSYLKQFFNSSVIDVFNQRNKKSIFPYSVSLPQSCSILDYRAVIEKIPEDDKPSFFGLPANIARSSQRMISSQVISQLRILGRSITAGSKFDREIWSNELSPVLNLWKKLNQNSNLIHQKVPPPNDRQGSPILSFIILEQFNAIRLVQSVHQSLAALSKVIRGTTLLSSEVQKLASALLNQKCPLAWQSKWEGPEDPLQYLRGLVARALAIQNWVDKAEKQALLSETLDLSELFHPDTFLNALRQETARAVGRSVDSLKFVASWKGRLQEAKLQIKISGLLLEGCSFDGNQLSENQLDSPSVSSVLPCFMGWIPQDACGPYSPDECISLPVYTSAERDRVVTNIDVPCGGNQDQWIQCGAALFLKNQ

SEQ ID NO: 688 - protein, 338 aa, Homo sapiens
MLSALARPASAALRRSFSTSAQNNAKVAVLGASGGIGQPLSLLLKNSPLVSRLTLYDIAHTPGVAADLSHIETKAAVKGYLGPEQLPDCLKGCDVVVIPAGVPRKPGMTRDDLFNTNATIVATLTAACAQHCPEAMICVIANPVNSTIPITAEVFKKHGVYNPNKIFGVTTLDIVRANTFVAELKGLDPARVNVPVIGGHAGKTIIPLISQCTPKVDFPQDQLTALTGRIQEAGTEVVKAKAGAGSATLSMAYAGARFVFSLVDAMNGKEGVVECSFVKSQETECTYFSTPLLLGKKGIEKNLGIGKVSSFEEKMISDAIPELKASIKKGEDFVKTLK

SEQ ID NO: 689 - protein, 101 aa, Homo sapiens
MSNTQAERSIIGMIDMFHKYTRRDDKIEKPSLLTMMKENFPNFLSACDKKGTNYLADVFEKKDKNEDKKIDFSEFLSLLGDIATDYHKQSHGAAPCSGGSQ

SEQ ID NO: 690 - protein, 3458 aa, Homo sapiens
MERSGWARQTFLLALLLGATLRARAAAGYYPRFSPFFFLCTHHGELEGDGEQGEVLISLHIAGNPTYYVPGQEYHVTISTSTFFDGLLVTGLYTSTSVQASQSIGGSSAFGFGIMSDHQFGNQFMCSVVASHVSHLPTTNLSFIWIAPPAGTGCVNFMATATHRGQVIFKDALAQQLCEQGAPTDVTVHPHLAEIHSDSIILRDDFDSYHQLQLNPNIWVECNNCETGEQCGAIMHGNAVTFCEPYGPRELITTGLNTTTASVLQFSIGSGSCRFSYSDPSIIVLYAKNNSADWIQLEKIRAPSNVSTIIHILYLPEDAKGENVQFQWKQENLRVGEVYEACWALDNILIINSAHRQVVLEDSLDPVDTGNWLFFPGATVKHSCQSDGNSIYFHGNEGSEFNFATTRDVDLSTEDIQEQWSEEFESQPTGWDVLGAVIGTECGTIESGLSMVFLKDGERKLCTPSMDTTGYGNLRFYFVMGGICDPGNSHENDIILYAKIEGRKEHITLDTLSYSSYKVPSLVSVVINPELQTPATKFCLRQKNHQGHNRNVWAVDFFHVLPVLPSTMSHMIQFSINLGCGTHQPGNSVSLEFSTNHGRSWSLLHTECLPEICAGPHLPHSTVYSSENYSGWNRITIPLPNAALTRNTRIRWRQTGPILGNMWAIDNVYIGPSCLKFCSGRGQCTRHGCKCDPGFSGPACEMASQTFPMFISESFGSSRLSSYHNFYSIRGAEVSFGCGVLASGKALVFNKDGRRQLITSFLDSSQSRFLQFTLRLGSKSVLSTCRAPDQPGEGVLLHYSYDNGITWKLLEHYSYLSYHEPRIISVELPGDAKQFGIQFRWWQPYHSSQREDVWAIDEIIMTSVLFNSISLDFTNLVEVTQSLGFYLGNVQPYCGHDWTLCFTGDSKLASSMRYVETQSMQIGASYMIQFSLVMGCGQKYTPHMDNQVKLEYSTNHGLTWHLVQEECLPSMPSCQEFTSASIYHASEFTQWRRVIVLLPQKTWSSATRFRWSQSYYTAQDEWALDSIYIGQQCPNMCSGHGSCDHGICRCDQGYQGTECHPEAALPSTIMSDFENQNGWESDWQEVIGGEIVKPEQGCGVISSGSSLYFSKAGKRQLVSWDLDTSWVDFVQFYIQIGGESASCNKPDSREEGVLLQYSNNGGIQWHLLAEMYFSDFSKPRFVYLELPAAAKTPCTRFRWWQPVFSGEDYDQWAVDDIIILSEKQKQIIPVINPTLPQNFYEKPAFDYPMNQMSVWLMLANEGMVKNETFCAATPSAMIFGKSDGDRFAVTRDLTLKPGYVLQFKLNIGCANQFSSTAPVLLQYSHDAGMSWFLVKEGCYPASAGKGCEGNSRELSEPTMYHTGDFEEWTRITIVIPRSLASSKTRFRWIQESSSQKNVPPFGLDGVYISEPCPSYCSGHGDCISGVCFCDLGYTAAQGTCVSNVPNHNEMFDRFEGKLSPLWYKITGAQVGTGCGTLNDGKSLYFNGPGKREARTVPLDTRNIRLVQFYIQIGSKTSGITCIKPRTRNEGLIVQYSNDNGILWHLLRELDFMSFLEPQIISIDLPQDAKTPATAFRWWQPQHGKHSAQWALDDVLIGMNDSSQTGFQDKFDGSIDLQANWYRIQGGQVDIDCLSMDTALIFTENIGKPRYAETWDFHVSASTFLQFEMSMGCSKPFSNSHSVQLQYSLNNGKDWHLVTEECVPPTIGCLHYTESSIYTSERFQNWKRITVYLPLSTISPRTRFRWIQANYTVGADSWAIDNVVLASGCPWMCSGRGICDAGRCVCDRGFGGPYCVPVVPLPSILKDDFNGNLHPDLWPEVYGAERGNLNGETIKSGTSLIFKGEGLRMLISRDLDCTNTMYVQFSLRFIAKSTPERSHSILLQFSISGGITWHLMDEFYFPQTTNILFINVPLPYTAQTNATRFRLWQPYNNGKKEEIWIVDDFIIDGNNVNNPVMLLDTFDFGPREDNWFFYPGGNIGLYCPYSSKGAPEEDSAMVFVSNEVGEHSITTRDLNVNENTIIQFEINVGCSTDSSSADPVRLEFSRDFGATWHLLLPLCYHSSSHVSSLCSTEHHPSSTYYAGTMQGWRREVVHFGKLHLCGSVRFRWYQGFYPAGSQPVTWAIDNVYIGPQCEEMCNGQGSCINGTKCICDPGYSGPTCKISTKNPDFLKDDFEGQLESDRFLLMSGGKPSRKCGILSSGNNLFFNEDGLRMLMTRDLDLSHARFVQFFMRLGCGKGVPDPRSQPVLLQYSLNGGLSWSLLQEFLFSNSSNVGRYIALEIPLKARSGSTRLRWWQPSENGHFYSPWVIDQILIGGNISGNTVLEDDFTTLDSRKWLLHPGGTKMPVCGSTGDALVFIEKASTRYVVSTDVAVNEDSFLQIDFAASCSVTDSCYAIELEYSVDLGLSWHPLVRDCLPTNVECSRYHLQRILVSDTFNKWTRITLPLPPYTRSQATRFRWHQPAPFDKQQTWAIDNVYIGDGCIDMCSGHGRCIQGNCVCDEQWGGLYCDDPETSLPTQLKDNFNRAPSSQNWLTVNGGKLSTVCGAVASGMALHFSGGCSRLLVTVDLNLTNAEFIQFYFMYGCLITPNNRNQGVLLEYSVNGGITWNLLMEIFYDQYSKPGFVNILLPPDAKEIATRFRWWQPRHDGLDQNDWAIDNVLISGSADQRTVMLDTFSSAPVPQHERSPADAGPVGRIAFDMFMEDKTSVNEHWLFHDDCTVERFCDSPDGVMLCGSHDGREVYAVTHDLTPTEGWIMQFKISVGCKVSEKIAQNQIHVQYSTDFGVSWNYLVPQCLPADPKCSGSVSQPSVFFPTKGWKRITYPLPESLVGNPVRFRFYQKYSDMQWAIDNFYLGPGCLDNCRGHGDCLREQCICDPGYSGPNCYLTHTLKTFLKERFDSEEIKPDLWMSLEGGSTCTECGILAEDTALYFGGSTVRQAVTQDLDLRGAKFLQYWGRIGSENNMTSCHRPICRKEGVLLDYSTDGGITWTLLHEMDYQKYISVRHDYILLPEDALTNTTRLRWWQPFVISNGIVVSGVERAQWALDNILIGGAEINPSQLVDTFDDEGTSHEENWSFYPNAVRTAGFCGNPSFHLYWPNKKKDKTHNALSSRELIIQPGYMMQFKIVVGCEATSCGDLHSVMLEYTKDARSDSWQLVQTQCLPSSSNSIGCSPFQFHEATIYNSVNSSSWKRITIQLPDHVSSSATQFRWIQKGEETEKQSWAIDHVYIGEACPKLCSGHGYCTTGAICICDESFQGDDCSVFSHDLPSYIKDNFESARVTEANWETIQGGVIGSGCGQLAPYAHGDSLYFNGCQIRQAATKPLDLTRASKIMFVLQIGSMSQTDSCNSDLSGPHAVDKAVLLQYSVNNGITWHVIAQHQPKDFTQAQRVSYNVPLEARMKGVLLRWWQPRHNGTGHDQWALDHVEVVLTRKQNYMMNFSRQHGLRHFYNRRRRSLRRYP

SEQ ID NO: 691 - protein, 2083 aa, Homo sapiens
MFSKKPHGDVKKSTQKVLDTKKDALTRLKHLRIVIENAESIDLKQFFDQHFSHIYYVFFENFVTIEASLKQKGHKSQREELDAILFIFEKILQLLPERIHQRWQFHSIGLILKKLLHTGNSLKIRREGVRLFLLWLQALQNNCSKEQLWMFSCLIPGFSAPQSEHGPRTLDNLINPPLNLQETQVTIEEITPLVPPQSGDKGQEDLTSYFLEALLKYIVIQVKSLEWKNKENQERGFSFLFSHFKKYYLPYIFPNICKENSLYHPILDIPQMRPKPHYVVIKKDAETNEAIYCTKEPFIKARVIVIRWLVSFWLEPKPHTGPHIPGMEGEVLPKNIQRAAASLVSREESKNDNADKTDRTTEPEQSHSNTSTLTEREPSSSSLCSIDEEHLTDIEIVRRVFSSKRSNVNFVTEIFRQAFLLPICEAAAMRKVVKVYQEWIQQEEKPLFMQEPEEIVITSSDLPCIENVTDHDISMEEGEKREEENGTNTADHVRNSSWAKNGSYQGALHNASEEATEQNIRAGTQAVLQVFIINSSNIFLLEPANEIKNLLDEHTDMCKRILNIYRYMVVQVSMDKKTWEQMLLVLLRVTESVLKMPSQAFLQFQGKKNMTLAGRLAGPLFQTLIVAWIKANLNVYISRELWDDLLSVLSSLTYWEELATEWSLTMETLTKVLARNLYSLDLSDLPLDKLSEQKQKKHKGKGVGHEFQKVSVDKSFSRGWSRDQPGQAPMRQRSATTTGSPGTEKARSIVRQKTVDIDDAQILPRSTRVRHFSQSEETGNEVFGALNEEQPLPRSSSTSDILEPFTVERAKVNKEDMSQKLPPLNSDIGGSSANVPDLMDEFIAERLRSGNASTMTRRGSSPGSLEIPKDLPDILNKQNQMRPIDDPGVPSEWTSPASAGSSDLISSDSHSDSFSAFQYDGRKFDNFGFGTDTGVTSSADVDSGSGHHQSAEEQEVASLTTLHIDSETSSLNQQAFSAEVATITGSESASPVHSPLGSRSQTPSPSTLNIDHMEQKDLQLDEKLHHSVLQTPDDLEISEFPSECCSVMAGGTLTGWHADVATVMWRRMLGILGDVNSIMDPEIHAQVFDYLCELWQNLAKIRDNLGISTDNLTSPSPPVLIPPLRILTPWLFKATMLTDKYKQGKLHAYKLICNTMKRRQDVSPNRDFLTHFYNIMHCGLLHIDQDIVNTIIKHCSPQFFSLGLPGATMLIMDFIVAAGRVASSAFLNAPRVEAQVLLGSLVCFPNLYCELPSLHPNIPDVAVSQFTDVKELIIKTVLSSARDEPSGPARCVALCSLGIWICEELVHESHHPQIKEALNVICVSLKFTNKTVAHVACNMLHMLVHYVPRLQIYQPDSPLKIIQILIATITHLLPSTEASSYEMDKRLVVSLLLCLLDWIMALPLKTLLQPFHATGAESDKTEKSVLNCIYKVLHGCVYGAQCFSNPRYFPMSLSDLASVDYDPFMHLESLKEPEPLHSPDSERSSKLQPVTEVKTQMQHGLISIAARTVITHLVNHLGHYPMSGGPAMLTSQVCENHDNHYSESTELSPELFESPNIQFFVLNNTTLVSCIQIRSEENMPGGGLSAGLASANSNVRIIVRDLSGKYSWDSAILYGPPPVSGLSEPTSFMLSLSHQEKPEEPPTSNECLEDITVKDGLSLQFKRFRETVPTWDTIRDEEDVLDELLQYLGVTSPECLQRTGISLNIPAPQPVCISEKQENDVINAILKQHTEEKEFVEKHFNDLNMKAVEQDEPIPQKPQSAFYYCRLLLSILGMNSWDKRRSFHLLKKNEKLLRELRNLDSRQCRETHKIAVFYVAEGQEDKHSILTNTGGSQAYEDFVAGLGWEVNLTNHCGFMGGLQKNKSTGLTTPYFATSTVEVIFHVSTRMPSDSDDSLTKKLRHLGNDEVHIVWSEHTRDYRRGIIPTEFGDVLIVIYPMKNHMFSIQIMKKPEVPFFGPLFDGAIVNGKVLPIMVRATAINASRALKSLIPLYQNFYEERARYLQTIVQHHLEPTTFEDFAAQVFSPAPYHHLPSDAGSYPEILPSETPTATQVDGADLASPMSPRTSKSRMSMKLRRSSGSANKS

SEQ ID NO: 692 - protein, 3269 aa, Homo sapiens
MLSRLSGLANVVLHELSGDDDTDQNMRAPLDPELHQESDMEFNNTTQEDVQERLAYAEQLVVELKDIIRQKDVQLQQKDEALQEERKAADNKIKKLKLHAKAKLTSLNKYIEEMKAQGGTVLPTEPQSEEQLSKHDKSSTEEEMEIEKIKHKLQEKEELISTLQAQLTQAQAEQPAQSSTEMEEFVMMKQQLQEKEEFISTLQAQLSQTQAEQAAQLSSMQQVVREKDARFETQVRLHEDELLQLVTQADVETEMQQKLRVLQRKLEEHEESLVGRAQVVDLLQQELTAAEQRNQILSQQLQQMEAEHNTLRNTVETEREESKILLEKMELEVAERKLSFHNLQEEMHHLLEQFEQAGQAQAELESRYSALEQKHKAEMEEKTSHILSLQKTGQELQSACDALKDQNSKLLQDKNEQAVQSAQTIQQLEDQLQQKSKEISQFLNRLPLQQHETASQTSFPDVYNEGTQAVTEENIASLQKRVVELENEKGALLLSSIELEELKAENEKLSSQITLLEAQNRTGEADREVSEISIVDIANKRSSSAEESGQDVLENTFSQKHKELSVLLLEMKEAQEEIAFLKLQLQGKRAEEADHEVLDQKEMKQMEGEGIAPIKMKVFLEDTGQDFPLMPNEESSLPAVEKEQASTEHQSRTSEEISLNDAGVELKSTKQDGDKSLSAVPDIGQCHQDELERLKSQILELELNFHKAQEIYEKNLDEKAKEISNLNQLIEEFKKNADNNSSAFTALSEERDQLLSQVKELSMVTELRAQVKQLEMNLAEAERQRRLDYESQTAHDNLLTEQIHSLSIEAKSKDVKIEVLQNELDDVQLQFSEQSTLIRSLQSQLQNKESEVLEGAERVRHISSKVEELSQALSQKELEITKMDQLLLEKKRDVETLQQTIEEKDQQVTEISFSMTEKMVQLNEEKFSLGVEIKTLKEQLNLLSRAEEAKKEQVEEDNEVSSGLKQNYDEMSPAGQISKEELQHEFDLLKKENEQRKRKLQAALINRKELLQRVSRLEEELANLKDESKKEIPLSETERGEVEEDKENKEYSEKCVTSKCQEIEIYLKQTISEKEVELQHIRKDLEEKLAAEEQFQALVKQMNQTLQDKTNQIDLLQAEISENQAIIQKLITSNTDASDGDSVALVKETVVISPPCTGSSEHWKPELEEKILALEKEKEQLQKKLQEALTSRKAILKKAQEKERHLREELKQQKDDYNRLQEQFDEQSKENENIGDQLRQLQIQVRESIDGKLPSTDQQESCSSTPGLEEPLFKATEQHHTQPVLESNLCPDWPSHSEDASALQGGTSVAQIKAQLKEIEAEKVELELKVSSTTSELTKKSEEVFQLQEQINKQGLEIESLKTVSHEAEVHAESLQQKLESSQLQIAGLEHLRELQPKLDELQKLISKKEEDVSYLSGQLSEKEAALTKIQTEIIEQEDLIKALHTQLEMQAKEHDERIKQLQVELCEMKQKPEEIGEESRAKQQIQRKLQAALISRKEALKENKSLQEELSLARGTIERLTKSLADVESQVSAQNKEKDTVLGRLALLQEERDKLITEMDRSLLENQSLSSSCESLKLALEGLTEDKEKLVKEIESLKSSKIAESTEWQEKHKELQKEYEILLQSYENVSNEAERIQHVVEAVRQEKQELYGKLRSTEANKKETEKQLQEAEQEMEEMKEKMRKFAKSKQQKILELEEENDRLRAEVHPAGDTAKECMETLLSSNASMKEELERVKMEYETLSKKFQSLMSEKDSLSEEVQDLKHQIEGNVSKQANLEATEKHDNQTNVTEEGTQSIPGETEEQDSLSMSTRPTCSESVPSAKSANPAVSKDFSSHDEINNYLQQIDQLKERIAGLEEEKQKNKEFSQTLENEKNTLLSQISTKDGELKMLQEEVTKMNLLNQQIQEELSRVTKLKETAEEEKDDLEERLMNQLAELNGSIGNYCQDVTDAQIKNELLESEMKNLKKCVSELEEEKQQLVKEKTKVESEIRKEYLEKIQGAQKEPGNKSHAKELQELLKEKQQEVKQLQKDCIRYQEKISALERTVKALEFVQTESQKDLEITKENLAQAVEHRKKAQAELASFKVLLDDTQSEAARVLADNLKLKKELQSNKESVKSQMKQKDEDLERRLEQAEEKHLKEKKNMQEKLDALRREKVHLEETIGEIQVTLNKKDKEVQQLQENLDSTVTQLAAFTKSMSSLQDDRDRVIDEAKKWERKFSDAIQSKEEEIRLKEDNCSVLKDQLRQMSIHMEELKINISRLEHDKQIWESKAQTEVQLQQKVCDTLQGENKELLSQLEETRHLYHSSQNELAKLESELKSLKDQLTDLSNSLEKCKEQKGNLEGIIRQQEADIQNSKFSYEQLETDLQASRELTSRLHEEINMKEQKIISLLSGKEEAIQVAIAELRQQHDKEIKELENLLSQEEEENIVLEEENKKAVDKTNQLMETLKTIKKENIQQKAQLDSFVKSMSSLQNDRDRIVGDYQQLEERHLSIILEKDQLIQEAAAENNKLKEEIRGLRSHMDDLNSENAKLDAELIQYREDLNQVITIKDSQQKQLLEVQLQQNKELENKYAKLEEKLKESEEANEDLRRSFNALQEEKQDLSKEIESLKVSISQLTRQVTALQEEGTLGLYHAQLKVKEEEVHRLSALFSSSQKRIAELEEELVCVQKEAAKKVGEIEDKLKKELKHLHHDAGIMRNETETAEERVAELARDLVEMEQKLLMVTKENKGLTAQIQSFGRSMSSLQNSRDHANEELDELKRKYDASLKELAQLKEQGLLNRERDALLSETAFSMNSTEENSLSHLEKLNQQLLSKDEQLLHLSSQLEDSYNQVQSFSKAMASLQNERDHLWNELEKFRKSEEGKQRSAAQPSTSPAEVQSLKKAMSSLQNDRDRLLKELKNLQQQYLQINQEITELHPLKAQLQEYQDKTKAFQIMQEELRQENLSWQHELHQLRMEKSSWEIHERRMKEQYLMAISDKDQQLSHLQNLIRELRSSSSQTQPLKVQYQRQASPETSASPDGSQNLVYETELLRTQLNDSLKEIHQKELRIQQLNSNFSQLLEEKNTLSIQLCDTSQSLRENQQHYGDLLNHCAVLEKQVQELQAVSKEKGPLNIDVAPGAPQEKNGVHRKSDPEELREPQQSFSEAQQQLCNTRQEVNELRKLLEEERDQRVAAENALSVAEEQIRRLEHSEWDSSRTPIIGSCGTQEQALLIDLTSNSCRRTRSGVGWKRVLRSLCHSRTRVPLLAAIYFLMIHVLLILCFTGHL

SEQ ID NO: 693 - protein, 2839 aa, Homo sapiens
MAAHRPVEWVQAVVSRFDEQLPIKTGQQNTHTKVSTEHNKECLINISKYKFSLVISGLTTILKNVNNMRIFGEAAEKNLYLSQLIILDTLEKCLAGQPKDTMRLDETMLVKQLLPEICHFLHTCREGNQHAAELRNSASGVLFSLSCNNFNAVFSRISTRLQELTVCSEDNVDVHDIELLQYINVDCAKLKRLLKETAFKFKALKKVAQLAVINSLEKAFWNWVENYPDEFTKLYQIPQTDMAECAEKLFDLVDGFAESTKRKAAVWPLQIILLILCPEIIQDISKDVVDENNMNKKLFLDSLRKALAGHGGSRQLTESAAIACVKLCKASTYINWEDNSVIFLLVQSMVVDLKNLLFNPSKPFSRGSQPADVDLMIDCLVSCFRISPHNNQHFKICLAQNSPSTFHYVLVNSLHRIITNSALDWWPKIDAVYCHSVELRNMFGETLHKAVQGCGAHPAIRMAPSLTFKEKVTSLKFKEKPTDLETRSYKYLLLSMVKLIHADPKLLLCNPRKQGPETQGSTAELITGLVQLVPQSHMPEIAQEAMEALLVLHQLDSIDLWNPDAPVETFWEISSQMLFYICKKLTSHQMLSSTEILKWLREILICRNKFLLKNKQADRSSCHFLLFYGVGCDIPSSGNTSQMSMDHEELLRTPGASLRKGKGNSSMDSAAGCSGTPPICRQAQTKLEVALYMFLWNPDTEAVLVAMSCFRHLCEEADIRCGVDEVSVHNLLPNYNTFMEFASVSNMMSTGRAALQKRVMALLRRIEHPTAGNTEAWEDTHAKWEQATKLILNYPKAKMEDGQAAESLHKTIVKRRMSHVSGGGSIDLSDTDSLQEWINMTGFLCALGGVCLQQRSNSGLATYSPPMGPVSERKGSMISVMSSEGNADTPVSKFMDRLLSLMVCNHEKVGLQIRTNVKDLVGLELSPALYPMLFNKLKNTISKFFDSQGQVLLTDTNTQFVEQTIAIMKNLLDNHTEGSSEHLGQASIETMMLNLVRYVRVLGNMVHAIQIKTKLCQLVEVMMARRDDLSFCQEMKFRNKMVEYLTDWVMGTSNQAADDDVKCLTRDLDQASMEAVVSLLAGLPLQPEEGDGVELMEAKSQLFLKYFTLFMNLLNDCSEVEDESAQTGGRKRGMSRRLASLRHCTVLAMSNLLNANVDSGLMHSIGLGYHKDLQTRATFMEVLTKILQQGTEFDTLAETVLADRFERLVELVTMMGDQGELPIAMALANVVPCSQWDELARVLVTLFDSRHLLYQLLWNMFSKEVELADSMQTLFRGNSLASKIMTFCFKVYGATYLQKLLDPLLRIVITSSDWQHVSFEVDPTRLEPSESLEENQRNLLQMTEKFFHAIISSSSEFPPQLRSVCHCLYQATCHSLLNKATVKEKKENKKSVVSQRFPQNSIGAVGSAMFLRFINPAIVSPYEAGILDKKPPPRIERGLKLMSKILQSIANHVLFTKEEHMRPFNDFVKSNFDAARRFFLDIASDCPTSDAVNHSLSFISDGNVLALHRLLWNNQEKIGQYLSSNRDHKAVGRRPFDKMATLLAYLGPPEHKPVADTHWSSLNLTSSKFEEFMTRHQVHEKEEFKALKTLSIFYQAGTSKAGNPIFYYVARRFKTGQINGDLLIYHVLLTLKPYYAKPYEIVVDLTHTGPSNRFKTDFLSKWFVVFPGFAYDNVSAVYIYNCNSWVREYTKYHERLLTGLKGSKRLVFIDCPGKLAEHIEHEQQKLPAATLALEEDLKVFHNALKLAHKDTKVSIKVGSTAVQVTSAERTKVLGQSVFLNDIYYASEIEEICLVDENQFTLTIANQGTPLTFMHQECEAIVQSIIHIRTRWELSQPDSIPQHTKIRPKDVPGTLLNIALLNLGSSDPSLRSAAYNLLCALTCTFNLKIEGQLLETSGLCIPANNTLFIVSISKTLAANEPHLTLEFLEECISGFSKSSIELKHLCLEYMTPWLSNLVRFCKHNDDAKRQRVTAILDKLITMTINEKQMYPSIQAKIWGSLGQITDLLDVVLDSFIKTSATGGLGSIKAEVMADTAVALASGNVKLVSSKVIGRMCKIIDKTCLSPTPTLEQHLMWDDIAILARYMLMLSFNNSLDVAAHLPYLFHVVTFLVATGPLSLRASTHGLVINIIHSLCTCSQLHFSEETKQVLRLSLTEFSLPKFYLLFGISKVKSAAVIAFRSSYRDRSFSPGSYERETFALTSLETVTEALLEIMEACMRDIPTCKWLDQWTELAQRFAFQYNPSLQPRALVVFGCISKRVSHGQIKQIIRILSKALESCLKGPDTYNSQVLIEATVIALTKLQPLLNKDSPLHKALFWVAVAVLQLDEVNLYSAGTALLEQNLHTLDSLRIFNDKSPEEVFMAIRNPLEWHCKQMDHFVGLNFNSNFNFALVGHLLKGYRHPSPAIVARTVRILHTLLTLVNKHRNCDKFEVNTQSVAYLAALLTVSEEVRSRCSLKHRKSLLLTDISMENVPMDTYPIHHGDPSYRTLKETQPWSSPKGSEGYLAATYPTVGQTSPRARKSMSLDMGQPSQANTKKLLGTRKSFDHLISDTKAPKRQEMESGITTPPKMRRVAETDYEMETQRISSSQQHPHLRKVSVSESNVLLDEEVLTDPKIQALLLTVLATLVKYTTDEFDQRILYEYLAEASVVFPKVFPVVHNLLDSKINTLLSLCQDPNLLNPIHGIVQSVVYHEESPPQYQTSYLQSFGFNGLWRFAGPFSKQTQIPDYAELIVKFLDALIDTYLPGIDEETSEESLLTPTSPYPPALQSQLSITANLNLSNSMTSLATSQHSPGIDKENVELSPTTGHCNSGRTRHGSASQVQKQRSAGSFKRNSIKKIV

SEQ ID NO: 694 - protein, 434 aa, Homo sapiens
MAMQKIFAREILDSRGNPTVEVDLHTAKGRFRAAVPSGASTGIYEALELRDGDKGRYLGKGVLKAVENINNTLGPALLQKKLSVVDQEKVDKFMIELDGTENKSKFGANAILGVSLAVCKAGAAEKGVPLYRHIADLAGNPDLILPVPAFNVINGGSHAGNKLAMQEFMILPVGASSFKEAMRIGAEVYHHLKGVIKAKYGKDATNVGDEGGFAPNILENNEALELLKTAIQAAGYPDKVVIGMDVAASEFYRNGKYDLDFKSPDDPARHITGEKLGELYKSFIKNYPVVSIEDPFDQDDWATWTSFLSGVNIQIVGDDLTVTNPKRIAQAVEKKACNCLLLKVNQIGSVTESIQACKLAQSNGWGVMVSHRSGETEDTFIADLVVGLCTGQIKTGAPCRSERLAKYNQLMRIEEALGDKAIFAGRKFRNPKAK

SEQ ID NO: 695 - protein, 2352 aa, Homo sapiens
MEKATVPVAAATAAEGEGSPPAVAAVAGPPAAAEVGGGVGGSSRARSASSPRGMVRVCDLLLKKKPPQQQHHKAKRNRTCRPPSSSESSSDSDNSGGGGGGGGGGGGGGGTSSNNSEEEEDDDDEEEEVSEVESFILDQDDLENPMLETASKLLLSGTADGADLRTVDPETQARLEALLEAAGIGKLSTADGKAFADPEVLRRLTSSVSCALDEAAAALTRMRAESTANAGQSDNRSLAEACSEGDVNAVRKLLIEGRSVNEHTEEGESLLCLACSAGYYELAQVLLAMHANVEDRGIKGDITPLMAAANGGHVKIVKLLLAHKADVNAQSSTGNTALTYACAGGYVDVVKVLLESGASIEDHNENGHTPLMEAGSAGHVEVARLLLENGAGINTHSNEFKESALTLACYKGHLEMVRFLLEAGADQEHKTDEMHTALMEACMDGHVEVARLLLDSGAQVNMPADSFESPLTLAACGGHVELAALLIERGASLEEVNDEGYTPLMEAAREGHEEMVALLLGQGANINAQTEETQETALTLACCGGFLEVADFLIKAGADIELGCSTPLMEAAQEGHLELVKYLLAAGANVHATTATGDTALTYACENGHTDVADVLLQAGADLEHESEGGRTPLMKAARAGHVCTVQFLISKGANVNRTTANNDHTVLSLACAGGHLAVVELLLAHGADPTHRLKDGSTMLIEAAKGGHTSVVCYLLDYPNNLLSAPPPDVTQLTPPSHDLNRAPRVPVQALPMVVPPQEPDKPPANVATTLPIRNKAVSGRASAMSNTPTHSIAASISQPQTPTPSPIISPSAMLPIYPAIDIDAQTESNHDTALTLACAGGHEELVQTLLERGASIEHRDKKGFTPLILAATAGHVGVVEILLDNGADIEAQSERTKDTPLSLACSGGRQEVVELLLARGANKEHRNVSDYTPLSLAASGGYVNIIKILLNAGAEINSRTGSKLGISPLMLAAMNGHTAAVKLLLDMGSDINAQIETNRNTALTLACFQGRTEVVSLLLDRKANVEHRAKTGLTPLMEAASGGYAEVGRVLLDKGADVNAPPVPSSRDTALTIAADKGHYKFCELLIGRGAHIDVRNKKGNTPLWLAANGGHLDVVQLLVQAGADVDAADNRKITPLMAAFRKGHVKVVRYLVKEVNQFPSDSECMRYIATITDKEMLKKCHLCMESIVQAKDRQAAEANKNASILLEELDLEKLREESRRLALAAKREKRKEKRRKKKEEQRRKLEEIEAKNKENFELQAAQEKEKLKVEDEPEVLTEPPSATTTTTIGISATWTTLAGSHGKRNNTITTTSSKRKNRKNKITPENVQIIFDDPLPISYSQPEKVNGESKSSSTSESGDSDNMRISSCSDESSNSNSSRKSDNHSPAVVTTTVSSKKQPSVLVTFPKEERKSVSGKASIKLSETISEGTSNSLSTCTKSGPSPLSSPNGKLTVASPKRGQKREEGWKEVVRRSKKVSVPSTVISRVIGRGGCNINAIREFTGAHIDIDKQKDKTGDRIITIRGGTESTRQATQLINALIKDPDKEIDELIPKNRLKSSSANSKIGSSAPTTTAANTSLMGIKMTTVALSSTSQTATALTVPAISSASTHKTIKNPVNNVRPGFPVSLPLAYPPPQFAHALLAAQTFQQIRPPRLPMTHFGGTFPPAQSTWGPFPVRPLSPARATNSPKPHMVPRHSNQNSSGSQVNSAGSLTSSPTTTTSSSASTVPGTSTNGSPSSPSVRRQLFVTVVKTSNATTTTVTTTASNNNTAPTNATYPMPTAKEHYPVSSPSSPSPPAQPGGVSRNSPLDCGSASPNKVASSSEQEAGSPPVVETTNTRPPNSSSSSGSSSAHSNQQQPPGSVSQEPRPPLQQSQVPPPEVRMTVPPLATSSAPVAVPSTAPVTYPMPQTPMGCPQPTPKMETPAIRPPPHGTTAPHKNSASVQNSSVAVLSVNHIKRPHSVPSSVQLPSTLSTQSACQNSVHPANKPIAPNFSAPLPFGPFSTLFENSPTSAHAFWGGSVVSSQSTPESMLSGKSSYLPNSDPLHQSDTSKAPGFRPPLQRPAPSPSGIVNMDSPYGSVTPSSTHLGNFASNISGGQMYGPGAPLGGAPAAANFNRQHFSPLSLLTPCSSASNDSSAQSVSSGVRAPSPAPSSVPLGSEKPSNVSQDRKVPVPIGTERSARIRQTGTSAPSVIGSNLSTSVGHSGIWSFEGIGGNQDKVDWCNPGMGNPMIHRPMSDPGVFSQHQAMERDSTGIVTPSGTFHQHVPAGYMDFPKVGGMPFSVYGNAMIPPVAPIPDGAGGPIFNGPHAADPSWNSLIKMVSSSTENNGPQTVWTGPWAPHMNSVHMNQLG

SEQ ID NO: 696 - protein, 338 aa, Homo sapiens [sequence omitted]

SEQ ID NO: 697 - protein, 1909 aa, Homo sapiens
MEGKRQLEKRDFGKRLSLDSSLVEYMDSNKYIEHLLTQLEEQHRSLWREKLAVARLQREVAQRTSEGAMHEKLIHELEEERHLRLQSEKRLQEVTLESERNRIQMRSLQQQFSRMEETVRNLLQSQGSPEQKKEETVNIMVYQEKLSEEERKHKEALEDLHMVVDEDSRSESSSTDEGKEKTKLLLERLKALEAENSALALENENQREQYERCLDEVANQVVQALLTQKDLREECVKLKTRVFDLEQQNRTLSILFQQRVRPTSDLLLQKLHSRLLDLSSGDLLSEVERNRSLTQSRTDAEVHEHQLNTKSALKCPGLGAVIPGHLCPRNSYSSSSELSLSSTCSEYSSGSSYTWHDGKNLRKRQSSQNWDKRLSIDSSLPSGFASPTNELPPTRIKESHILEGLRKLQKRKVLLEPPSVITKWGYKDCMNSNEGIYSPGIKSSSLKEYPPCKTADLGSPCKEPHKTFVYDLDSHVDADDDPSTLALLQAVPNQSCRPHGSKLTHSVSDSLFGWETNRKHFLEGTSSVYPKERPEKLTSCASSCPLEMKLCPSVQTPQVQRERGPQGQGHGRMALNLQLSDTDDNETFDELHIESSDEKSPSDVSLAADTDKSVENLDVLVGFGKSLCGSPEEEEKQVPIPSETRPKTFSFIKQQRVVKRTSSEECVTVIFDAEDGEPIEFSSHQTGVVTVTRNEISINSTPAGPKAEHTELLPQGIACLQPRAAARDYTFFKRSEEDTEKNIPKDNVDNVPRVSTESFSSRTVTQNPQQQKLVKPTHNISCQSNSRSSAPMGIYQKQNLTKIPPRGKSSPQKSKLMEPEATTLLPSSGLVTLEKSPALAPGKLSRFMKTESSGPLFELRSDPHIPKHSAQLPHSSRMPSRRDWVQCPKSQTPGSRSRPAIESSDSGEPPTRDEHCGSGPEAGVKSPSPPPPPGRSVSLLARPSYDYSPAPSSTKSETRVPSETARTPFKSPLLKGISAPVISSNPATTEVQRKKPSVAFKKPIFTHPMPSPEAVIQTRCPAHAPSSSFTVMALGPPKVSPKRGVPKTSPRQTLGTPQRDIGLQTPRISPSTHEPLEMTSSKSVSPGRKGQLNDSASTPPKPSFLGVNESPSSQVSSSSSSSSPAKSHNSPHGCQSAHEKGLKTRLPVGLKVLMKSPQLLRKSSTVPGKHEKDSLNEASKSSVAVNKSKPEDSKNPASMEITAGERNVTLPDSQAQGSLADGLPLETALQEPLESSIPGSDGRDGVDNRSMRRSLSSSKPHLKPALGMNGAKARSHSFSTHSGDKPSTPPIEGSGKVRTQIITNTAERGNSLTRQNSSTESSPNKAPSAPMLESLPSVGRPSGHPSSGKGSLGSSGSFSSQHGSPSKLPLRIPPKSEGLLIPPGKEDQQAFTQGECPSANVAVLGEPGSDRRSCPPTPTDCPEALQSPGRTQHPSTFETSSTSKLETSGRHPDASATATDAVSSEAPLSPTIEEKVMLCIQENVEKGQVQTKPTSVEAKQKPGPSFASWFGFRKSRLPALSSRKMDISKTKVEKKDAKVLGFGNRQLKSERKKEKKKPELQCETENELIKDTKSADNPDGGLQSKNNRRTPQDIYNQLKIEPRNRHSPVACSTKDTFMTELLNRVDKKAAPQTESGSSNASCRNVLKGSSQGSCLIGSSISTQGNHKKNMKIKADMEVPKDSLVKEANENLQEDEDDAVADSVFQSHIIESNCQMRTLDSGIGTFPLPDSGNRSTGRYLCQPDSPEDAEPLLPLQSALSAVSSMRAQTLEREVPSSTDGQRPADSAIVHSTSDPIMTARGMRPLQSRLPKPASSGKVSSQKQNEAEPRPQTCSSFGYAEDPMASQPLPDWGSEVAATGTQDKAPRMCTYSASGGSNSDSDLDYGDNGFGAGRGQLVKALKSAAPEIETT

SEQ ID NO: 698 - protein, 3667 aa, Homo sapiens
MWSWFLCWKPVQLDRQTASGFIYTCGGTLKGLNGTIESPGFPYGYPNGANCTWVIIAEERNRIQIVFQSFALEEEYDYLSLYDGHPHPTNFRTRLTGFHLPPPVTSTKSVFSLRLTSDFAVSAHGFKVYYEELQSSSCGNPGVPPKGVLYGTRFDVGDKIRYSCVTGYILDGHPQLTCIANSVNTASWDFPVPICRAEDACGGTMRGSSGIISSPSFPNEYHNNADCTWTIVAEPGDTISLIFTDFQMEEKYDYLEIEGSEPPTIWLSGMNIPPPIISNKNWLRLHFVTDSNHRYRGFSAPYQGSSTLTHTTSTGELEEHNRTTTGAIAVASTPADVTVSSVTAVTIHRLSEEQRVQVTSLRNSGLDPNTSKDGLSPHPADTQSTRRRPRHAEQIERTKELAVVTHRVKKAIDFKSRGFKLFPGKDNSNKFSILNEGGIKTASNLCPDPGEPENGKRIGSDFSLGSTVQFSCDEDYVLQGAKSITCQRIAEVFAAWSDHRPVCKVKTCGSNLQGPSGTFTSPNFPFQYDSNAQCVWVITAVNTNKVIQINFEEFDLEIGYDTLTIGDGGEVGDPRTVLQVLTGSFVPDLIVSMSSQMWLHLQTDESVGSVGFKVNYKEIEKESCGDPGTPLYGIREGDGFSNRDVLRFECQFGFELIGEKSIVCQENNQWSANIPICIFPCLSNFTAPMGTVLSPDYPEGYGNNLNCIWTIISDPGSRIHLSFNDFDLESQFDFLAVKDGDSPESPILGTFTGAEVPSHLTSNSHILRLEFQADHSMSGRGFNITYNTFGHNECPDPGIPINARRFGDNFQLGSSISVICEEGFIKTQGTETITCILMDGKVMWSGLIPKCGAPCGGHFSAPSGVILSPGWPGYYKDSLNCEWVIEAEPGHSIKITFERFQTELNYDVLEVHDGPNLLSPLLGSYNGTQVPQFLFSSSNFIYLLFTTDNSRSNNGFKIHYESVTVNTYSCLDPGIPVHGRRYGHDFSIGSTVSFSCDSGYRLSHEEPLLCEKNHWWSHPLPTCDALCGGDVRGPSGTILSPGYPEFYPNSLNCTWTVDVTHGKGVQFNFHTFHLEDHHDYLLITENGSFTQPLARLTGSDLPPTINAGLYGNFRAQLRFISDFSISYEGFNITFSEYNLEPCEDPGIPQYGSRIGFNFGIGDTLTFSCSSGYRLEGTSEIICLGGGRRVWSAPLPRCVAECGASATNNEGILLSPNYPLNYENNHECIYSIQVQAGKGINISARTFHLAQGDVLKIYDGKDKTTHLLGAFTGASMRGLTLSSTSNQLWLEFNSDTEGTDEGFQLVYTSFELSHCEDPGIPQFGYKISDQGHFAGSTIIYGCNPGYTLHGSSLLKCMTGERRAWDYPLPSCIAECGGRFKGESSGRILSPGYPFPYDNNLRCMWMIEVDPGNIVSLQFLAFDTEASHDILRVWDGPPENDMLLKEISGSLIPEGIHSTLNIVTIQFDTDFYISKSGFAIQFSSSVATACRDPGVPMNGTRNGDGREPGDTVVFQCDPGYELQGEERITCIQVENRYFWQPSPPVCIAPCGGNLTGSSGFILSPNFPHPYPHSRDCDWTITVNADYVISLAFISFSIEPNYDFLYIYDGPDSNSPLIGSFQDSKLPERIESSSNTMHLAFRSDGSVSYTGFHLEYKAKLRESCFDPGNIMNGTRLGMDYKLGSTVTYYCDAGYVLQGYSTLTCIMGDDGRPGWNRALPSCHAPCGSRSTGSEGTVLSPNYPKNYSVGHNCVYSIAVPKEFVVFGQFVFFQTSLHDVVEVYDGPTQQSSLLSSLSGSHSGESLPLSSGNQITIRFTSVGPITAKGFHFVYQAVPRTSSTQCSSVPEPRFGRRIGNEFAVGSSVLFDCNPGYILHGSIAIRCETVPNSLAQWNDSLPTCIVPCGGILTKRKGTILSPGYPEPYDNNLNCVWKITVPEGAGIQVQVVSFATEHNWDSLDFYDGGDNNAPRLGSYSGTTIPHLLNSTSNNLYLNFQSDISVSAAGFHLEYTAIGLDSCPEPQTPSSGIKIGDRYMVGDVVSFQCDQGYSLQGHSHITCMPGPVRRWNYPIPICLAQCGGAMSDFSGVILSPGFPGNYPSSLDCTWTINLPIGFGVHLQFVNFSTETIHDYLEVRSGSSETSTVIGRLSGPQIPSSLFSTTHETSLYFHSDYSQNKQGFHIVYQAYQLQSCPDPRPFRNGFVIGNDFTVGQTISFECFPGYTLIGNSALTCLHGVSRNWNHPLPRCEALCGGNITAMNGTIYSPGYPDEYPNFQDCFWLVRVPPGNGIYINFTVLQTEPIYDFITVWDGPDQNSPQIGQFSGNTALESVYSTSNQILIKFHSDFTTSGFFVLSYHAYQLRVCQPPPPVPNAEILTEDDEFEIGDIIRYQCLPGFTLVGNAILTCRLGERLQMDGAPPVCQVLCPANELRLDSTGVILSPGYPDSYPNLQMCAWSISVEKGYNITMFVEFFQTEKEFDVLQVYDGPNIQSPVLISLSGDYSSAFNITSNGHEVFLQWSADHGNNKKGFRIRYIAFYCSTPESPPHGYIISQTGGQLNSVVRWACDRGFRLVGKSSAVCRKSSYGYHAWDAPVPACQAISCGIPKAPTNGGILTTDYLVGTRVTYFCNDGYRLSSKELTTAVCQSDGTWSNHNKTPRCVVVTCPSINSFILEHGRWRIVNGSHYEYKTKVVFSCDPGYHGLGPASIECLPNGTWSWRNERPYCQIISCGELPTPPNGNKIGTQTSYGSTAIFTCDLGFMLVGSAVRECLSSGLWSESETRCLAGHCGIPELIVNGQVIGENYGYRDTVVYQCNPGFRLIGSSVRICQQDHNWSGQLPSCVPVSCGHPGSPIYGRTSGNGFNFNDVVTFSCNIGYLMQGPTKAQCQANRQWSHPPPMCKVVNCSDPGIPANSKRESKIEHGNFTYGTVVFYDCNPGYFLFGSSVLICQPNGQWDKPLPECIMIDCGHPGVPPNAVLSGEKYTFGSTVHYSCTGKRSLLGQSSRTCQLNGHWSGSQPHCSGDATGTCGDPGTPGHGSRQESNFRTKSTVRYACDTGYILHGSEERTCLANGSWTGRQPECKAVQCGNPGTTANGKVFRIDGTTFSSSVIYSCMEGYILSGPSVRQCTANGTWSGTLPNCTIISCGDPGIPANGLRYGDDYVVGQNVSYMCQPGYTMELNGSRIRTCTINGTWSGVMPTCRAVTCPTPPQISNGRLEGTNFDWGFSISYICSPGYELSFPAVLTCVGNGTWSGEVPQCLPKFCGDPGIPAQGKREGKSFIYQSEVSFSCNFPFILVGSSTRICQADGTWSGSSPHCIEPTQTSCENPGVPRHGSQNNTFGFQVGSVVQFHCKKGHLLQGSTTRTCLPDLTWSGIQPECIPHSCKQPETPAHANVVGMDLPSHGYTLIYTCQPGFFLAGGTEHRVCRSDNTWTGKVPICEAGSKILVKDPRPALGTPSPKLSVPDDVFAQNYIWKGSYNFKGRKQPMTLTVTSFNASTGRVNATLSNSNMELLLSGVYKSQEARLMLRIYLIKVPAHASVKKMKEENWAMDGFVSAEPDGATYVFQGFIQGKDYGQFGLQRLGLNMSEGSNSSNQPHGTNSSSVAIAILVPFFALIFAGFGFYLYKQRTAPKTQYTGCSVHENNNGQAAFENPMYDTNAKSVEGKAVRFDPNLNTVCTMV

SEQ ID NO: 699 - protein, 2514 aa, Homo sapiens
MSGSTQPVAQTWRATEPRYPPHSLSYPVQIARTHTDVGLLEYQHHSRDYASHLSPGSIIQPQRRRPSLLSEFQPGNERSQELHLRPESHSYLPELGKSEMEFIESKRPRLELLPDPLLRPSPLLATGQPAGSEDLTKDRSLTGKLEPVSPPSPPHTDPELELVPPRLSKEELIQNMDRVDREITMVEQQISKLKKKQQQLEEEAAKPPEPEKPVSPPPIESKHRSLVQIIYDENRKKAEAAHRILEGLGPQVELPLYNQPSDTRQYHENIKINQAMRKKLILYFKRRNHARKQWEQKFCQRYDQLMEAWEKKVERIENNPRRRAKESKVREYYEKQFPEIRKQRELQERMQSRVGQRGSGLSMSAARSEHEVSEIIDGLSEQENLEKQMRQLAVIPPMLYDADQQRIKFINMNGLMADPMKVYKDRQVMNMWSEQEKETFREKFMQHPKNFGLIASFLERKTVAECVLYYYLTKKNENYKSLVRRSYRRRGKSQQQQQQQQQQQQQQQQQPMPRSSQEEKDEKEKEKEAEKEEEKPEVENDKEDLLKEKTDDTSGEDNDEKEAVASKGRKTANSQGRRKGRITRSMANEANSEEAITPQQSAELASMELNESSRWTEEEMETAKKGLLEHGRNWSAIARMVGSKTVSQCKNFYFNYKKRQNLDEILQQHKLKMEKERNARRKKKKAPAAASEEAAFPPVVEDEEMEASGVSGNEEEMVEEAEALHASGNEVPRGECSGPATVNNSSDTESIPSPHTEAAKDTGQNGPKPPATLGADGPPPGPPTPPPEDIPAPTEPTPASEATGAPTPPPAPPSPSAPPPVVPKEEKEEETAAAPPVEEGEEQKPPAAEELAVDTGKAEEPVKSECTEEAEEGPAKGKDAEAAEATAEGALKAEKKEGGSGRATTAKSSGAPQDSDSSATCSADEVDEAEGGDKNRLLSPRPSLLTPTGDPRANASPQKPLDLKQLKQRAAAIPPIQVTKVHEPPREDAAPTKPAPPAPPPPQNLQPESDAPQQPGSSPRGKSRSPAPPADKEAFAAEAQKLPGDPPCWTSGLPFPVPPREVIKASPHAPDPSAFSYAPPGHPLPLGLHDTARPVLPRPPTISNPPPLISSAKHPSVLERQIGAISQGMSVQLHVPYSEHAKAPVGPVTMGLPLPMDPKKLAPFSGVKQEQLSPRGQAGPPESLGVPTAQEASVLRGTALGSVPGGSITKGIPSTRVPSDSAITYRGSITHGTPADVLYKGTITRIIGEDSPSRLDRGREDSLPKGHVIYEGKKGHVLSYEGGMSVTQCSKEDGRSSSGPPHETAAPKRTYDMMEGRVGRAISSASIEGLMGRAIPPERHSPHHLKEQHHIRGSITQGIPRSYVEAQEDYLRREAKLLKREGTPPPPPPSRDLTEAYKTQALGPLKLKPAHEGLVATVKEAGRSIHEIPREELRHTPELPLAPRPLKEGSITQGTPLKYDTGASTTGSKKHDVRSLIGSPGRTFPPVHPLDVMADARALERACYEESLKSRPGTASSSGGSIARGAPVIVPELGKPRQSPLTYEDHGAPFAGHLPRGSPVTTREPTPRLQEGSLSSSKASQDRKLTSTPREIAKSPHSTVPEHHPHPISPYEHLLRGVSGVDLYRSHIPLAFDPTSIPRGIPLDAAAAYYLPRHLAPNPTYPHLYPPYLIRGYPDTAALENRQTIINDYITSQQMHHNAATAMAQRADMLRGLSPRESSLALNYAAGPRGIIDLSQVPHLPVLVPPTPGTPATAMDRLAYLPTAPQPFSSRHSSSPLSPGGPTHLTKPTTTSSSERERDRDRERDRDREREKSILTSTTTVEHAPIWRPGTEQSSGSSGGGGGSSSRPASHSHAHQHSPISPRTQDALQQRPSVLHNTGMKGIITAVEPSTPTVLRSTSTSSPVRPAATFPPATHCPLGGTLDGVYPTLMEPVLLPKEAPRVARPERPRADTGHAFLAKPPARSGLEPASSPSKGSEPRPLVPPVSGHATIARTPAKNLAPHHASPDPPAPPASASDPHREKTQSKPFSIQELELRSLGYHGSSYSPEGVEPVSPVSSPSLTHDKGLPKHLEELDKSHLEGELRPKQPGPVKLGGEAAHLPHLRPLPESQPSSSPLLQTAPGVKGHQRVVTLAQHISEVITQDYTRHHPQQLSAPLPAPLYSFPGASCPVLDLRRPPSDLYLPPPDHGAPARGSPHSEGGKRSPEPNKTSVLGGGEDGIEPVSPPEGMTEPGHSRSAVYPLLYRDGEQTEPSRMGSKSPGNTSQPPAFFSKLTESNSAMVKSKKQEINKKLNTHNRNEPEYNISQPGTEIFNMPAITGTGLMTYRSQAVQEHASTNMGLEAIIRKALMGKYDQWEESPPLSANAFNPLNASASLPAAMPITAADGRSDHTLTSPGGGGKAKVSGRPSSRKAKSPAPGLASGDRPPSVSSVHSEGDCNRRTPLTNRVWEDRPSSAGSTPFPYNPLIMRLQAGVMASPPPPGLPAGSGPLAGPHHAWDEEPKPLLCSQYETLSDSE

SEQ ID NO: 700 - protein, 2439 aa, Homo sapiens
MVQRWLLLSCCGALLSAGLANTSYTSPGLQRLKDSPQTAPDKGQCSTWGAGHFSTFDHHVYDFSGTCNYIFAATCKDAFPTFSVQLRRGPDGSISRIIVELGASVVTVSEAIISVKDIGVISLPYTSNGLQITPFGQSVRLVAKQLELELEVVWGPDSHLMVLVERKYMGQMCGLCGNFDGKVTNEFVSEEGKFLEPHKFAALQKLDDPGEICTFQDIPSTHVRQAQHARICTQLLTLVAPECSVSKEPFVLSCQADVAAAPQPGPQNSSCATLSEYSRQCSMVGQPVRRWRSPGLCSVGQCPANQVYQECGSACVKTCSNPQHSCSSSCTFGCFCPEGTVLNDLSNNHTCVPVTQCPCVLHGAMYAPGEVTIAACQTCRCTLGRWVCTERPCPGHCSLEGGSFVTTFDARPYRFHGTCTYILLQSPQLPEDGALMAVYDKSGVSHSETSLVAVVYLSRQDKIVISQDEVVTNNGEAKWLPYKTRNITVFRQTSTHLQMATSFGLELVVQLRPIFQAYVTVGPQFRGQTRGLCGNFNGDTTDDFTTSMGIAEGTASLFVDSWRAGNCPAALERETDPCSMSQLNKVCAETHCSMLLRTGTVFERCHATVNPAPFYKRCVYQACNYEETFPHICAALGDYVHACSLRGVLLWGWRSSVDNCTIPCTGNTTFSYNSQACERTCLSLSDRATECHHSAVPVDGCNCPDGTYLNQKGECVRKAQCPCILEGYKFILAEQSTVINGITCHCINGRLSCPQRPQMFLASCQAPKTFKSCSQSSENKFGAACAPTCQMLATGVACVPTKCEPGCVCAEGLYENADGQCVPPEECPCEFSGVSYPGGAELHTDCRTCSCSRGRWACQQGTHCPSTCTLYGEGHVITFDGQRFVFDGNCEYILATDVCGVNDSQPTFKILTENVICGNSGVTCSRAIKIFLGGLSVVLADRNYTVTGEEPHVQLGVTPGALSLVVDISIPGRYNLTLIWNRHMTILIRIARASQDPLCGLCGNFNGNMKDDFETRSRYVASSELELVNSWKESPLCGDVSFVTDPCSLNAFRRSWAERKCSVINSQTFATCHSKVYHLPYYEACVRDACGCDSGGDCECLCDAVAAYAQACLDKGVCVDWRTPAFCPIYCGFYNTHTQDGHGEYQYTQEANCTWHYQPCLCPSQPQSVPGSNIEGCYNCSQDEYFDHEEGVCVPCMPPTTPQPPTTPQLPTTGSRPTQVWPMTGTSTTIGLLSSTGPSPSSNHTPASPTQTPLLPATLTSSKPTASSGEPPRPTTAVTPQATSGLPPTATLRSTATKPTVTQATTRATASTASPATTSTAQSTTRTTMTLPTPATSGTSPTLPKSTNQELPGTTATQTTGPRPTPASTTGPTTPQPGQPTRPTATETTQTRTTTEYTTPQTPHTTHSPPTAGSPVPSTGPVTATSFHATTTYPTPSHPETTLPTHVPPFSTSLVTPSTHTVITPTHAQMATSASNHSAPTGTIPPPTTLKATGSTHTAPPITPTTSGTSQAHSSFSTNKTPTSLHSHTSSTHHPEVTPTSTTTITPNPTSTRTRTPVAHTNSATSSRPPPPFTTHSPPTGSSPFSSTGPMTATSFKTTTTYPTPSHPQTTLPTHVPPFSTSLVTPSTHTVITPTHAQMATSASIHSMPTGTIPPPTTLKATGSTHTAPTMTLTTSGTSQALSSLNTAKTSTSLHSHTSSTHHAEATSTSTTNITPNPTSTGTPPMTVTTSGTSQSRSSFSTAKTSTSLHSHTSSTHHPEVTSTSTTSITPNHTSTGTRTPVAHTTSATSSRLPTPFTTHSPPTGTTPISSTGPVTATSFQTTTTYPTPSHPHTTLPTHVPSFSTSLVTPSTHTVIIPTHTQMATSASIHSMPTGTIPPPTTIKATGSTHTAPPMTPTTSGTSQSPSSFSTAKTSTSLPYHTSSTHHPEVTPTSTTNITPKHTSTGTRTPVAHTTSASSSRLPTPFTTHSPPTGSSPFSSTGPMTATSFQTTTTYPTPSHPQTTLPTHVPPFSTSLVTPSTHTVIITTHTQMATSASIHSTPTGTVPPPTTLKATGSTHTAPPMTVTTSGTSQTHSSFSTATASSSFISSSSWLPQNSSSRPPSSPITTQLPHLSSATTPVSTTNQLSSSFSPSPSAPSTVSSYVPSSHSSPQTSSPSVGTSSSFVSAPVHSTTLSSGSHSSLSTHPTTASVSASPLFPSSPAASTTIRATLPHTISSPFTLSALLPISTVTVSPTPSSHLASSTIAFPSTPRTTASTHTAPAFSSQSTTSRSTSLTTRVPTSGFVSLTSGVTGIPTSPVTNLTTRHPGPTLSPTTRFLTSSLTAHGSTPASAPVSSLGTPTPTSPGVCSVREQQEEITFKGCMANVTVTRCEGACISAASFNIITQQVDARCSCCRPLHSYEQQLELPCPDPSTPGRRLVLTLQVFSHCVCSSVACGD

SEQ ID NO: 701 - protein, 2310 aa, Homo sapiens
MSSSGYPPNQGAFSTEQSRYPPHSVQYTFPNTRHQQEFAVPDYRSSHLEVSQASQLLQQQQQQQLRRRPSLLSEFHPGSDRPQERRTSYEPFHPGPSPVDHDSLESKRPRLEQVSDSHFQRVSAAVLPLVHPLPEGLRASADAKKDPAFGGKHEAPSSPISGQPCGDDQNASPSKLSKEELIQSMDRVDREIAKVEQQILKLKKKQQQLEEEAAKPPEPEKPVSPPPVEQKHRSIVQIIYDENRKKAEEAHKIFEGLGPKVELPLYNQPSDTKVYHENIKTNQVMRKKLILFFKRRNHARKQREQKICQRYDQLMEAWEKKVDRIENNPRRKAKESKTREYYEKQFPEIRKQREQQERFQRVGQRGAGLSATIARSEHEISEIIDGLSEQENNEKQMRQLSVIPPMMFDAEQRRVKFINMNGLMEDPMKVYKDRQFMNVWTDHEKEIFKDKFIQHPKNFGLIASYLERKSVPDCVLYYYLTKKNENYKALVRRNYGKRRGRNQQIARPSQEEKVEEKEEDKAEKTEKKEEEKKDEEEKDEKEDSKENTKEKDKIDGTAEETEEREQATPRGRKTANSQGRRKGRITRSMTNEAAAASAAAAAATEEPPPPLPPPPEPISTEPVETSRWTEEEMEVAKKGLVEHGRNWAAIAKMVGTKSEAQCKNFYFNYKRRHNLDNLLQQHKQKTSRKPREERDVSQCESVASTVSAQEDEDIEASNEEENPEDSEGAENSSDTESAPSPSPVEAVKPSEDSPENATSRGNTEPAVELEPTTETAPSTSPSLAVPSTKPAEDESVETQVNDSISAETAEQMDVDQQEHSAEEGSVCDPPPATKADSVDVEVRVPENHASKVEGDNTKERDLDRASEKVEPRDEDLVVAQQINAQRPEPQSDNDSSATCSADEDVDGEPERQRMFPMDSKPSLLNPTGSILVSSPLKPNPLDLPQLQHRAAVIPPMVSCTPCNIPIGTPVSGYALYQRHIKAMHESALLEEQRQRQEQIDLECRSSTSPCGTSKSPNREWEVLQPAPHQVITNLPEGVRLPTTRPTRPPPPLIPSSKTTVASEKPSFIMGGSISQGTPGTYLTSHNQASYTQETPKPSVGSISLGLPRQQESAKSATLPYIKQEEFSPRSQNSQPEGLLVRAQHEGVVRGTAGAIQEGSITRGTPTSKISVESIPSLRGSITQGTPALPQTGIPTEALVKGSISRMPIEDSSPEKGREEAASKGHVIYEGKSGHILSYDNIKNAREGTRSPRTAHEISLKRSYESVEGNIKQGMSMRESPVSAPLEGLICRALPRGSPHSDLKERTVLSGSIMQGTPRATTESFEDGLKYPKQIKRESPPIRAFEGAITKGKPYDGITTIKEMGRSIHEIPRQDILTQESRKTPEVVQSTRPIIEGSISQGTPIKFDNNSGQSAIKHNVKSLITGPSKLSRGMPPLEIVPENIKVVERGKYEDVKAGETVRSRHTSVVSSGPSVLRSTLHEAPKAQLSPGIYDDTSARRTPVSYQNTMSRGSPMMNRTSDVTISSNKSTNHERKSTLTPTQRESIPAKSPVPGVDPVVSHSPFDPHHRGSTAGEVYRSHLPTHLDPAMPFHRALDPAAAAYLFQRQLSPTPGYPSQYQLYAMENTRQTILNDYITSQQMQVNLRPDVARGLSPREQPLGLPYPATRGIIDLTNMPPTILVPHPGGTSTPPMDRITYIPGTQITFPPRPYNSASMSPGHPTHLAAAASAEREREREREKERERERIAAASSDLYLRPGSEQPGRPGSHGYVRSPSPSVRTQETMLQQRPSVFQGTNGTSVITPLDPTAQLRIMPLPAGGPSISQGLPASRYNTAADALAALVDAAASAPQMDVSKTKEISSHRYETPSDAIEVISPASSPAPPQEKLQTYQPEVVKANQAENDPTRQYEGPLHHYRPQQESPSPQQQLPPSSQAEGMGQVPRTHRLITLADHICQIITQDFARNQVSSQTPQQPPTSTFQNSPSALVSTPVRTKTSNRYSPESQAQSVHHQRPGSRVSPENLVDKSRGSRPGKSPERSHVSSEPYEPISPPQVPVVHEKQDSLLLLSQRGAEPAEQRNDARSPGSISYLPSFFTKLENTSPMVKSKKQEIFRKLNSSGGGDSDMAAAQPGTEIFNLPAVTTSGSVSSRGHSFADPASNLGLEDIIRKALMGSFDDKVEDHGVVMSQPMGVVPGTANTSVVTSGETRREEGDPSPHSGGVCKPKLISKSNSRKSKSPIPGQGYLGTERPSSVSSVHSEGDYHRQTPGWAWEDRPSSTGSTQFPYNPLTMRMLSSTPPTPIACAPSAVNQAAP

SEQ ID NO: 702 - protein, 2427 aa, Homo sapiens
MPLKTRTALSDDPDSSTSTLGNMLELPGTSSSSTSQELPFCQPKKKSTPLKYEVGDLIWAKFKRRPWWPCRICSDPLINTHSKMKVSNRRPYRQYYVEAFGDPSERAWVAGKAIVMFEGRHQFEELPVLRRRGKQKEKGYRHKVPQKILSKWEASVGLAEQYDVPKGSKNRKCIPGSIKLDSEEDMPFEDCTNDPESEHDLLLNGCLKSLAFDSEHSADEKEKPCAKSRARKSSDNPKRTSVKKGHIQFEAHKDERRGKIPENLGLNFISGDISDTQASNELSRIANSLTGSNTAPGSFLFSSCGKNTAKKEFETSNGDSLLGLPEGALISKCSREKNKPQRSLVCGSKVKLCYIGAGDEEKRSDSISICTTSDDGSSDLDPIEHSSESDNSVLEIPDAFDRTENMLSMQKNEKIKYSRFAATNTRVKAKQKPLISNSHTDHLMGCTKSAEPGTETSQVNLSDLKASTLVHKPQSDFTNDALSPKFNLSSSISSENSLIKGGAANQALLHSKSKQPKFRSIKCKHKENPVMAEPPVINEECSLKCCSSDTKGSPLASISKSGKVDGLKLLNNMHEKTRDSSDIETAVVKHVLSELKELSYRSLGEDVSDSGTSKPSKPLLFSSASSQNHIPIEPDYKFSTLLMMLKDMHDSKTKEQRLMTAQNLVSYRSPGRGDCSTNSPVGVSKVLVSGGSTHNSEKKGDGTQNSANPSPSGGDSALSGELSASLPGLLSDKRDLPASGKSRSDCVTRRNCGRSKPSSKLRDAFSAQMVKNTVNRKALKTERKRKLNQLPSVTLDAVLQGDRERGGSLRGGAEDPSKEDPLQIMGHLTSEDGDHFSDVHFDSKVKQSDPGKISEKGLSFENGKGPELDSVMNSENDELNGVNQVVPKKRWQRLNQRRTKPRKRMNRFKEKENSECAFRVLLPSDPVQEGRDEFPEHRTPSASILEEPLTEQNHADCLDSAGPRLNVCDKSSASIGDMEKEPGIPSLTPQAELPEPAVRSEKKRLRKPSKWLLEYTEEYDQIFAPKKKQKKVQEQVHKVSSRCEEESLLARGRSSAQNKQVDENSLISTKEEPPVLEREAPFLEGPLAQSELGGGHAELPQLTLSVPVAPEVSPRPALESEELLVKTPGNYESKRQRKPTKKLLESNDLDPGFMPKKGDLGLSKKCYEAGHLENGITESCATSYSKDFGGGTTKIFDKPRKRKRQRHAAAKMQCKKVKNDDSSKEIPGSEGELMPHRTATSPKETVEEGVEHDPGMPASKKMQGERGGGAALKENVCQNCEKLGELLLCEAQCCGAFHLECLGLTEMPRGKFICNECRTGIHTCFVCKQSGEDVKRCLLPLCGKFYHEECVQKYPPTVMQNKGFRCSLHICITCHAANPANVSASKGRLMRCVRCPVAYHANDFCLAAGSKILASNSIICPNHFTPRRGCRNHEHVNVSWCFVCSEGGSLLCCDSCPAAFHRECLNIDIPEGNWYCNDCKAGKKPHYREIVWVKVGRYRWWPAEICHPRAVPSNIDKMRHDVGEFPVLFFGSNDYLWTHQARVFPYMEGDVSSKDKMGKGVDGTYKKALQEAAARFEELKAQKELRQLQEDRKNDKKPPPYKHIKVNRPIGRVQIFTADLSEIPRCNCKATDENPCGIDSECINRMLLYECHPTVCPAGGRCQNQCFSKRQYPEVEIFRTLQRGWGLRTKTDIKKGEFVNEYVGELIDEEECRARIRYAQEHDITNFYMLTLDKDRIIDAGPKGNYARFMNHCCQPNCETQKWSVNGDTRVGLFALSDIKAGTELTFNYNLECLGNGKTVCKCGAPNCSGFLGVRPKNQPIATEEKSKKFKKKQQGKRRTQGEITKEREDECFSCGDAGQLVSCKKPGCPKVYHADCLNLTKRPAGKWECPWHQCDICGKEAASFCEMCPSSFCKQHREGMLFISKLDGRLSCTEHDPCGPNPLEPGEIREYVPPPVPLPPGPSTHLAEQSTGMAAQAPKMSDKPPADTNQMLSLSKKALAGTCQRPLLPERPLERTDSRPQPLDKVRDLAGSGTKSQSLVSSQRPLDRPPAVAGPRPQLSDKPSPVTSPSSSPSVRSQPLERPLGTADPRLDKSIGAASPRPQSLEKTSVPTGLRLPPPDRLLITSSPKPQTSDRPTDKPHASLSQRLPPPEKVLSAVVQTLVAKEKALRPVDQNTQSKNRAALVMDLIDLTPRQKERAASPHQVTPQADEKMPVLESSSWPASKGLGHMPRAVEKGCVSDPLQTSGKAAAPSEDPWQAVKSLTQARLLSQPPAKAFLYEPTTQASGRASAGAEQTPGPLSQSPGLVKQAKQMVGGQQLPALAAKSGQSFRSLGKAPASLPTEEKKLVTTEQSPWALGKASSRAGLWPIVAGQTLAQSCWSAGSTQTLAQTCWSLGRGQDPKPEQNTLPALNQAPSSHKCAESEQK

SEQ ID NO: 703 - protein, 1818 aa, Homo sapiens
MEPWSSRWKTKRWLWDFTVTTLALTFLFQAREVRGAAPVDVLKALDFHNSPEGISKTTGFCTNRKNSKGSDTAYRVSKQAQLSAPTKQLFPGGTFPEDFSILFTVKPKKGIQSFLLSIYNEHGIQQIGVEVGRSPVFLFEDHTGKPAPEDYPLFRTVNIADGKWHRVAISVEKKTVTMIVDCKKKTTKPLDRSERAIVDTNGITVFGTRILDEEVFEGDIQQFLITGDPKAAYDYCEHYSPDCDSSAPKAAQAQEPQIDEKKKSNFKKKMRTVATKSKEKSKKFTPPKSEKFSSKKKKSYQASAKAKLGVKANIVDDFQEYNYGTMESYQTEAPRHVSGTNEPNPVEEIFTEEYLTGEDYDSQRKNSEDTLYENKEIDGRDSDLLVDGDLGEYDFYEYKEYEDKPTSPPNEEFGPGVPAETDITETSINGHGAYGEKGQKGEPAVVEPGMLVEGPPGPAGPAGIMGPPGLQGPTGPPGDPGDRGPPGRPGLPGADGLPGPPGTMLMLPFRYGGDGSKGPTISAQEAQAQAILQQARIALRGPPGPMGLTGRPGPVGGPGSSGAKGESGDPGPQGPRGVQGPPGPTGKPGKRGRPGADGGRGMPGEPGAKGDRGFDGLPGLPGDKGHRGERGPQGPPGPPGDDGMRGEDGEIGPRGLPGEAGPRGLLGPRGTPGAPGQPGMAGVDGPPGPKGNMGPQGEPGPPGQQGNPGPQGLPGPQGPIGPPGEKGPQGKPGLAGLPGADGPPGHPGKEGQSGEKGALGPPGPQGPIGYPGPRGVKGADGVRGLKGSKGEKGEDGFPGFKGDMGLKGDRGEVGQIGPRGEDGPEGPKGRAGPTGDPGPSGQAGEKGKLGVPGLPGYPGRQGPKGSTGFPGFPGANGEKGARGVAGKPGPRGQRGPTGPRGSRGARGPTGKPGPKGTSGGDGPPGPPGERGPQGPQGPVGFPGPKGPPGPPGKDGLPGHPGQRGETGFQGKTGPPGPGGVVGPQGPTGETGPIGERGHPGPPGPPGEQGLPGAAGKEGAKGDPGPQGISGKDGPAGLRGFPGERGLPGAQGAPGLKGGEGPQGPPGPVGSPGERGSAGTAGPIGLPGRPGPQGPPGPAGEKGAPGEKGPQGPAGRDGVQGPVGLPGPAGPAGSPGEDGDKGEIGEPGQKGSKGDKGENGPPGPPGLQGPVGAPGIAGGDGEPGPRGQQGMFGQKGDEGARGFPGPPGPIGLQGLPGPPGEKGENGDVGPMGPPGPPGPRGPQGPNGADGPQGPPGSVGSVGGVGEKGEPGEAGNPGPPGEAGVGGPKGERGEKGEAGPPGAAGPPGAKGPPGDDGPKGNPGPVGFPGDPGPPGEPGPAGQDGVGGDKGEDGDPGQPGPPGPSGEAGPPGPPGKRGPPGAAGAEGRQGEKGAKGEAGAEGPPGKTGPVGPQGPAGKPGPEGLRGIPGPVGEQGLPGAAGQDGPPGPMGPPGLPGLKGDPGSKGEKGHPGLIGLIGPPGEQGEKGDRGLPGTQGSPGAKGDGGIPGPAGPLGPPGPPGLPGPQGPKGNKGSTGPAGQKGDSGLPGPPGSPGPPGEVIQPLPILSSKKTRRHTEGMQADADDNILDYSDGMEEIFGSLNSLKQDIEHMKFPMGTQTNPARTCKDLQLSHPDFPDGEYWIDPNQGCSGDSFKVYCNFTSGGETCIYPDKKSEGVRISSWPKEKPGSWFSEFKRGKLLSYLDVEGNSINMVQMTFLKLLTASARQNFTYHCHQSAAWYDVSSGSYDKALRFLGSNDEEMSYDNNPFIKTLYDGCASRKGYEKTVIEINTPKIDQVPIVDVMINDFGDQNQKFGFEVGPVCFLG

SEQ ID NO: 704 - protein, 2743 aa, Homo sapiens
MSDKMSSFLHIGDICSLYAEGSTNGFISTLGLVDDRCVVQPETGDLNNPPKKFRDCLFKLCPMNRYSAQKQFWKAAKPGANSTTDAVLLNKLHHAADLEKKQNETENRKLLGTVIQYGNVIQLLHLKSNKYLTVNKRLPALLEKNAMRVTLDEAGNEGSWFYIQPFYKLRSIGDSVVIGDKVVLNPVNAGQPLHASSHQLVDNPGCNEVNSVNCNTSWKIVLFMKWSDNKDDILKGGDVVRLFHAEQEKFLTCDEHRKKQHVFLRTTGRQSATSATSSKALWEVEVVQHDPCRGGAGYWNSLFRFKHLATGHYLAAEVDPDQDASRSRLRNAQEKMVYSLVSVPEGNDISSIFELDPTTLRGGDSLVPRNSYVRLRHLCTNTWVHSTNIPIDKEEEKPVMLKIGTSPVKEDKEAFAIVPVSPAEVRDLDFANDASKVLGSIAGKLEKGTITQNERRSVTKLLEDLVYFVTGGTNSGQDVLEVVFSKPNRERQKLMREQNILKQIFKLLQAPFTDCGDGPMLRLEELGDQRHAPFRHICRLCYRVLRHSQQDYRKNQEYIAKQFGFMQKQIGYDVLAEDTITALLHNNRKLLEKHITAAEIDTFVSLVRKNREPRFLDYLSDLCVSMNKSIPVTQELICKAVLNPTNADILIETKLVLSRFEFEGVSSTGENALEAGEDEEEVWLFWRDSNKEIRSKSVRELAQDAKEGQKEDRDVLSYYRYQLNLFARMCLDRQYLAINEISGQLDVDLILRCMSDENLPYDLRASFCRLMLHMHVDRDPQEQVTPVKYARLWSEIPSEIAIDDYDSSGASKDEIKERFAQTMEFVEEYLRDVVCQRFPFSDKEKNKLTFEVVNLARNLIYFGFYNFSDLLRLTKILLAILDCVHVTTIFPISKMAKGEENKGNNDVEKLKSSNVMRSIHGVGELMTQVVLRGGGFLPMTPMAAAPEGNVKQAEPEKEDIMVMDTKLKIIEILQFILNVRLDYRISCLLCIFKREFDESNSQTSETSSGNSSQEGPSNVPGALDFEHIEEQAEGIFGGSEENTPLDLDDHGGRTFLRVLLHLTMHDYPPLVSGALQLLFRHFSQRQEVLQAFKQVQLLVTSQDVDNYKQIKQDLDQLRSIVEKSELWVYKGQGPDETMDGASGENEHKKTEEGNNKPQKHESTSSYNYRVVKEILIRLSKLCVQESASVRKSRKQQQRLLRNMGAHAVVLELLQIPYEKAEDTKMQEIMRLAHEFLQNFCAGNQQNQALLHKHINLFLNPGILEAVTMQHIFMNNFQLCSEINERVVQHFVHCIETHGRNVQYIKFLQTIVKAEGKFIKKCQDMVMAELVNSGEDVLVFYNDRASFQTLIQMMRSERDRMDENSPLMYHIHLVELLAVCTEGKNVYTEIKCNSLLPLDDIVRVVTHEDCIPEVKIAYINFLNHCYVDTEVEMKEIYTSNHMWKLFENFLVDICRACNNTSDRKHADSILEKYVTEIVMSIVTTFFSSPFSDQSTTLQTRQPVFVQLLQGVFRVYHCNWLMPSQKASVESCIRVLSDVAKSRAIAIPVDLDSQVNNLFLKSHSIVQKTAMNWRLSARNAARRDSVLAASRDYRNIIERLQDIVSALEDRLRPLVQAELSVLVDVLHRPELLFPENTDARRKCESGGFICKLIKHTKQLLEENEEKLCIKVLQTLREMMTKDRGYGEKLISIDELDNAELPPAPDSENATEELEPSPPLRQLEDHKRGEALRQVLVNRYYGNVRPSGRRESLTSFGNGPLSAGGPGKPGGGGGGSGSSSMSRGEMSLAEVQCHLDKEGASNLVIDLIMNASSDRVFHESILLAIALLEGGNTTIQHSFFCRLTEDKKSEKFFKVFYDRMKVAQQEIKATVTVNTSDLGNKKKDDEVDRDAPSRKKAKEPTTQITEEVRDQLLEASAATRKAFTTFRREADPDDHYQPGEGTQATADKAKDDLEMSAVITIMQPILRFLQLLCENHNRDLQNFLRCQNNKTNYNLVCETLQFLDCICGSTTGGLGLLGLYINEKNVALINQTLESLTEYCQGPCHENQNCIATHESNGIDIITALILNDINPLGKKRMDLVLELKNNASKLLLAIMESRHDSENAERILYNMRPKELVEVIKKAYMQGEVEFEDGENGEDGAASPRNVGHNIYILAHQLARHNKELQSMLKPGGQVDGDEALEFYAKHTAQIEIVRLDRTMEQIVFPVPSICEFLTKESKLRIYYTTERDEQGSKINDFFLRSEDLFNEMNWQKKLRAQPVLYWCARNMSFWSSISFNLAVLMNLLVAFFYPFKGVRGGTLEPHWSGLLWTAMLISLAIVIALPKPHGIRALIASTILRLIFSVGLQPTLFLLGAFNVCNKIIFLMSFVGNCGTFTRGYRAMVLDVEFLYHLLYLVICAMGLFVHEFFYSLLLFDLVYREETLLNVIKSVTRNGRSIILTAVLALILVYLFSIVGYLFFKDDFILEVDRLPNETAVPETGESLASEFLFSDVCRVESGENCSSPAPREELVPAEETEQDKEHTCETLLMCIVTVLSHGLRSGGGVGDVLRKPSKEEPLFAARVIYDLLFFFMVIIIVLNLIFGVIIDTFADLRSEKQKKEEILKTTCFICGLERDKFDNKTVTFEEHIKEEHNMWHYLCFIVLVKVKDSTEYTGPESYVAEMIKERNLDWFPRMRAMSLVSSDSEGEQNELRNLQEKLESTMKLVTNLSGQLSELKDQMTEQRKQKQRIGLLGHPPHMNVNPQQPA

SEQ ID NO: 705 - protein, 3174 aa, Homo sapiens
MVFESVVVDVLNRFLGDYVVDLDTSQLSLGIWKGAVALKNLQIKENALSQLDVPFKVKVGHIGNLKLIIPWKNLYTQPVEAVLEEIYLLIVPSSRIKYDPLKEEKQLMEAKQQELKRIEEAKQKVVDQEQHLPEKQDTFAEKLVTQIIKNLQVKISSIHIRYEDDITNRDKPLSFGISLQNLSMQTTDQYWVPCLHDETEKLVRKLIRLDNLFAYWNVKSQMFYLSDYDNSLDDLKNGIVNENIVPEGYDFVFRPISANAKLVMNRRSDFDFSAPKINLEIELHNIAIEFNKPQYFSIMELLESVDMMAQNLPYRKFKPDVPLHHHAREWWAYAIHGVLEVNVCPRLWMWSWKHIRKHRQKVKQYKELYKKKLTSKKPPGELLVSLEELEKTLDVFNITIARQTAEVEVKKAGYKIYKEGVKDPEDNKGWFSWLWSWSEQNTNEQQPDVQPETLEEMLTPEEKALLYEAIGYSETAVDPTLLKTFEALKFFVHLKSMSIVLRENHQKPELVDIVIEEFSTLIVQRPGAQAIKFETKIDSFHITGLPDNSEKPRLLSSLDDAMSLFQITFEINPLDETVSQRCIIEAEPLEIIYDARTVNSIVEFFRPPKEVHLAQLTAATLTKLEEFRSKTATGLLYIIETQKVLDLKINLKASYIIVPQDGIFSPTSNLLLLDLGHLKVTSKSRSELPDVKQGEANLKEIMDRAYDSFDIQLTSVQLLYSRVGDNWREARKLSVSTQHILVPMHFNLELSKAMVFMDVRMPKFKIYGKLPLISLRISDKKLQGIMELIESIPKPEPVTEVSAPVKSFQIQTSTSLGTSQISQKIIPLLELPSVSEDDSEEEFFDAPCSPLEEPLQFPTGVKSIRTRKLQKQDCSVNMTTFKIRFEVPKVLIEFYHLVGDCELSVVEILVLGLGAEIEIRTYDLKANAFLKEFCLKCPEYLDENKKPVYLVTTLDNTMEDLLTLEYVKAEKNVPDLKSTYNNVLQLIKVNFSSLDIHLHTEALLNTINYLHNILPQSEEKSAPVSTTETEDKGDVIKKLALKLSTNEDIITLQILAELSCLQIFIQDQKCNISEIKIEGLDSEMIMRPSETEINAKLRNIIVLDSDITAIYKKAVYITGKEVFSFKMVSYMDATAGSAYTDMNVVDIQVNLIVGCIEVVFVTKFLYSILAFIDNFQAAKQALAEATVQAAGMAATGVKELAQRSSRMALDINIKAPVVVIPQSPVSENVFVADFGLITMTNTFHMITESQSSPPPVIDLITIKLSEMRLYRSRFINDAYQEVLDLLLPLNLEVVVERNLCWEWYQEVPCFNVNAQLKPMEFILSQEDITTIFKTLHGNIWYEKDGSASPAVTKDQYSATSGVTTNASHHSGGATVVTAAVVEVHSRALLVKTTLNISFKTDDLTMVLYSPGPKQASFTDVRDPSLKLAEFKLENIISTLKMYTDGSTFSSFSLKNCILDDKRPHVKKATPRMIGLTVGFDKKDMMDIKYRKVRDGCVTDAVFQEMYICASVEFLQTVANVFLEAYTTGTAVETSVQTWTAKEEVPTQESVKWEINVIIKNPEIVFVADMTKNDAPALVITTQCEICYKGNLENSTMTAAIKDLQVRACPFLPVKRKGKITTVLQPCDLFYQTTQKGTDPQVIDMSVKSLTLKVSPVIINTMITITSALYTTKETIPEETASSTAHLWEKKDTKTLKMWFLEESNETEKIAPTTELVPKGEMIKMNIDSIFIVLEAGIGHRTVPMLLAKSRFSGEGKNWSSLINLHCQLELEVHYYNEMFGVWEPLLEPLEIDQTEDFRPWNLGIKMKKKAKMAIVESDPEEENYKVPEYKTVISFHSKDQLNITLSKCGLVMLNNLVKAFTEAATGSSADFVKDLAPFMILNSLGLTISVSPSDSFSVLNIPMAKSYVLKNGESLSMDYIRTKDNDHFNAMTSLSSKLFFILLTPVNHSTADKIPLTKVGRRLYTVRHRESGVERSIVCQIDTVEGSKKVTIRSPVQIRNHFSVPLSVYEGDTLLGTASPENEFNIPLGSYRSFIFLKPEDENYQMCEGIDFEEIIKNDGALLKKKCRSKNPSKESFLINIVPEKDNLTSLSVYSEDGWDLPYIMHLWPPILLRNLLPYKIAYYIEGIENSVFTLSEGHSAQICTAQLGKARLHLKLLDYLNHDWKSEYHIKPNQQDISFVSFTCVTEMEKTDLDIAVHMTYNTGQTVVAFHSPYWMVNKTGRMLQYKADGIHRKHPPNYKKPVLFSFQPNHFFNNNKVQLMVTDSELSNQFSIDTVGSHGAVKCKGLKMDYQVGVTIDLSSFNITRIVTFTPFYMIKNKSKYHISVAEEGNDKWLSLDLEQCIPFWPEYASSKLLIQVERSEDPPKRIYFNKQENCILLRLDNELGGIIAEVNLAEHSTVITFLDYHDGAATFLLINHTKNELVQYNQSSLSEIEDSLPPGKAVFYTWADPVGSRRLKWRCRKSHGEVTQKDDMMMPIDLGEKTIYLVSFFEGLQRIILFTEDPRVFKVTYESEKAELAEQEIAVALQDVGISLVNNYTKQEVAYIGITSSDVVWETKPKKKARWKPMSVKHTEKLEREFKEYTESSPSEDKVIQLDTNVPVRLTPTGHNMKILQPHVIALRRNYLPALKVEYNTSAHQSSFRIQIYRIQIQNQIHGAVFPFVFYPVKPPKSVTMDSAPKPFTDVSIVMRSAGHSQISRIKYFKVLIQEMDLRLDLGFIYALTDLMTEAEVTENTEVELFHKDIEAFKEEYKTASLVDQSQVSLYEYFHISPIKLHLSVSLSSGREEAKDSKQNGGLIPVHSLNLLLKSIGATLTDVQDVVFKLAFFELNYQFHTTSDLQSEVIRHYSKQAIKQMYVLILGLDVLGNPFGLIREFSEGVEAFFYEPYQGAIQGPEEFVEGMALGLKALVGGAVGGLAGAASKITGAMAKGVAAMTMDEDYQQKRREAMNKQPAGFREGITRGGKGLVSGFVSGITGIVTKPIKGAQKGGAAGFFKGVGKGLVGAVARPTGGIIDMASSTFQGIKRATETSEVESLRPPRFFNEDGVIRPYRLRDGTGNQMLQVMENGRFAKYKYFTHVMINKTDMLMITRRGVLFVTKGTFGQLTCEWQYSFDEFTKEPFIVHGRRLRIEAKERVKSVFHAREFGKIINFKTPEDARWILTKLQEAREPSPSL

SEQ ID NO: 706 - protein, 112 aa, Homo sapiens
DIVLTQSPLSLPVTPGEPASISCRSSQNLLZSBGBYLDWYLZKPGZSPZLLIYLGSNRASGVPNRFSGSGSGTBFTLKISRVZAZBVGVYYCMQALQTPLTFGGGTNVEIKR

SEQ ID NO: 707 - protein, 2298 aa, Homo sapiens
MDEEEDGAGAEESGQPRSFMRLNDLSGAGGRPGPGSAEKDPGSADSEAEGLPYPALAPVVFFYLSQDSRPRSWCLRTVCNPWFERISMLVILLNCVTLGMFRPCEDIACDSQRCRILQAFDDFIFAFFAVEMVVKMVALGIFGKKCYLGDTWNRLDFFIVIAGMLEYSLDLQNVSFSAVRTVRVLRPLRAINRVPSMRILVTLLLDTLPMLGNVLLLCFFVFFIFGIVGVQLWAGLLRNRCFLPENFSLPLSVDLERYYQTENEDESPFICSQPRENGMRSCRSVPTLRGDGGGGPPCGLDYEAYNSSSNTTCVNWNQYYTNCSAGEHNPFKGAINFDNIGYAWIAIFQVITLEGWVDIMYFVMDAHSFYNFIYFILLIIVGSFFMINLCLVVIATQFSETKQRESQLMREQRVRFLSNASTLASFSEPGSCYEELLKYLVYILRKAARRLAQVSRAAGVRVGLLSSPAPLGGQETQPSSSCSRSHRRLSVHHLVHHHHHHHHHYHLGNGTLRAPRASPEIQDRDANGSRRLMLPPPSTPALSGAPPGGAESVHSFYHADCHLEPVRCQAPPPRSPSEASGRTVGSGKVYPTVHTSPPPETLKEKALVEVAASSGPPTLTSLNIPPGPYSSMHKLLETQSTGACQSSCKISSPCLKADSGACGPDSCPYCARAGAGEVELADREMPDSDSEAVYEFTQDAQHSDLRDPHSRRQRSLGPDAEPSSVLAFWRLICDTFRKIVDSKYFGRGIMIAILVNTLSMGIEYHEQPEELTNALEISNIVFTSLFALEMLLKLLVYGPFGYIKNPYNIFDGVIVVISVWEIVGQQGGGLSVLRTFRLMRVLKLVRFLPALQRQLVVLMKTMDNVATFCMLLMLFIFIFSILGMHLFGCKFASERDGDTLPDRKNFDSLLWAIVTVFQILTQEDWNKVLYNGMASTSSWAALYFIALMTFGNYVLFNLLVAILVEGFQAEGDANKSESEPDFFSPSLDGDGDRKKCLALVSLGEHPELRKSLLPPLIIHTAATPMSLPKSTSTGLGEALGPASRRTSSSGSAEPGAAHEMKSPPSARSSPHSPWSAASSWTSRRSSRNSLGRAPSLKRRSPSGERRSLLSGEGQESQDEEESSEEERASPAGSDHRHRGSLEREAKSSFDLPDTLQVPGLHRTASGRGSASEHQDCNGKSASGRLARALRPDDPPLDGDDADDEGNLSKGERVRAWIRARLPACCLERDSWSAYIFPPQSRFRLLCHRIITHKMFDHVVLVIIFLNCITIAMERPKIDPHSAERIFLTLSNYIFTAVFLAEMTVKVVALGWCFGEQAYLRSSWNVLDGLLVLISVIDILVSMVSDSGTKILGMLRVLRLLRTLRPLRVISRAQGLKLVVETLMSSLKPIGNIVVICCAFFIIFGILGVQLFKGKFFVCQGEDTRNITNKSDCAEASYRWVRHKYNFDNLGQALMSLFVLASKDGWVDIMYDGLDAVGVDQQPIMNHNPWMLLYFISFLLIVAFFVLNMFVGVVVENFHKCRQHQEEEEARRREEKRLRRLEKKRRSKEKQMAEAQCKPYYSDYSRFRLLVHHLCTSHYLDLFITGVIGLNVVTMAMEHYQQPQILDEALKICNYIFTVIFVLESVFKLVAFGFRRFFQDRWNQLDLAIVLLSIMGITLEEIEVNASLPINPTIIRIMRVLRIARVLKLLKMAVGMRALLDTVMQALPQVGNLGLLFMLLFFIFAALGVELFGDLECDETHPCEGLGRHATFRNFGMAFLTLFRVSTGDNWNGIMKDTLRDCDQESTCYNTVISPIYFVSFVLTAQFVLVNVVIAVLMKHLEESNKEAKEEAELEAELELEMKTLSPQPHSPLGSPFLWPGVEGPDSPDSPKPGALHPAAHARSASHFSLEHPTDRQLFDTISLLIQGSLEWELKLMDELAGPGGQPSAFPSAPSLGGSDPQMQPHPTELPGPDLLTVRKSGVSRTHSLPNDSYMCRHGSTAEGPLGHRGWGLPKAQSGSVLSVHSQPADTSYILQLPKDAPHLLQPHSAPTWGTIPKLPPPGRSPLAQRPLRRQAAIRTDSLDVQGLGSREDLLAEVSGPSPPLARAYSFWGQSSTQAQQHSRSHSKISKHMTPPAPCPGPEPNWGKGPPETRSSLELDTELSWISGDLLPPGGQEEPPSPRDLKKCYSVEAQSCQRRPTSWLDEQRRHSIAVSCLDSGSQPHLGTDPSNLGGQPLGGPGSRPKKKLSPPSITIDPPESQGPRTPPSPGICLRRRAPSSDSKDPLASGPPDSMAASPSPKKDVLSLSGLSSDPADLDP

SEQ ID NO: 708 - protein, 2512 aa, Homo sapiens
MARFGDEMPARYGGGGSGAAAGVVVGSGGGRGAGGSRQGGQPGAQRMYKQSMAQRARTMALYNPIPVRQNCLTVNRSLFLFSEDNVVRKYAKKITEWPPFEYMILATIIANCIVLALEQHLPDDDKTPMSERLDDTEPYFIGIFCFEAGIKIIALGFAFHKGSYLRNGWNVMDFVVVLTGILATVGTEFDLRTLRAVRVLRPLKLVSGIPSLQVVLKSIMKAMIPLLQIGLLLFFAILIFAIIGLEFYMGKFHTTCFEEGTDDIQGESPAPCGTEEPARTCPNGTKCQPYWEGPNNGITQFDNILFAVLTVFQCITMEGWTDLLYNSNDASGNTWNWLYFIPLIIIGSFFMLNLVLGVLSGEFAKERERVENRRAFLKLRRQQQIERELNGYMEWISKAEEVILAEDETDGEQRHPFDGALRRTTIKKSKTDLLNPEEAEDQLADIASVGSPFARASIKSAKLENSTFFHKKERRMRFYIRRMVKTQAFYWTVLSLVALNTLCVAIVHYNQPEWLSDFLYYAEFIFLGLFMSEMFIKMYGLGTRPYFHSSFNCFDCGVIIGSIFEVIWAVIKPGTSFGISVLRALRLLRIFKVTKYWASLRNLVVSLLNSMKSIISLLFLLFLFIVVFALLGMQLFGGQFNFDEGTPPTNFDTFPAAIMTVFQILTGEDWNEVMYDGIKSQGGVQGGMVFSIYFIVLTLFGNYTLLNVFLAIAVDNLANAQELTKVEADEQEEEEAANQKLALQKAKEVAEVSPLSAANMSIAVKEQQKNQKPAKSVWEQRTSEMRKQNLLASREALYNEMDPDERWKAAYTRHLRPDMKTHLDRPLVVDPQENRNNNTNKSRAAEPTVDQRLGQQRAEDFLRKQARYHDRARDPSGSAGLDARRPWAGSQEAELSREGPYGRESDHHAREGSLEQPGFWEGEAERGKAGDPHRRHVHRQGGSRESRSGSPRTGADGEHRRHRAHRRPGEEGPEDKAERRARHREGSRPARGGEGEGEGPDGGERRRRHRHGAPATYEGDARREDKERRHRRRKENQGSGVPVSGPNLSTTRPIQQDLGRQDPPLAEDIDNMKNNKLATAESAAPHGSLGHAGLPQSPAKMGNSTDPGPMLAIPAMATNPQNAASRRTPNNPGNPSNPGPPKTPENSLIVTNPSGTQTNSAKTARKPDHTTVDIPPACPPPLNHTVVQVNKNANPDPLPKKEEEKKEEEEDDRGEDGPKPMPPYSSMFILSTTNPLRRLCHYILNLRYFEMCILMVIAMSSIALAAEDPVQPNAPRNNVLRYFDYVFTGVFTFEMVIKMIDLGLVLHQGAYFRDLWNILDFIVVSGALVAFAFTGNSKGKDINTIKSLRVLRVLRPLKTIKRLPKLKAVFDCVVNSLKNVFNILIVYMLFMFIFAVVAVQLFKGKFFHCTDESKEFEKDCRGKYLLYEKNEVKARDREWKKYEFHYDNVLWALLTLFTVSTGEGWPQVLKHSVDATFENQGPSPGYRMEMSIFYVVYFVVFPFFFVNIFVALIIITFQEQGDKMMEEYSLEKNERACIDFAISAKPLTRHMPQNKQSFQYRMWQFVVSPPFEYTIMAMIALNTIVLMMKFYGASVAYENALRVFNIVFTSLFSLECVLKVMAFGILNYFRDAWNIFDFVTVLGSITDILVTEFGNPNNFINLSFLRLFRAARLIKLLRQGYTIRILLWTFVQSFKALPYVCLLIAMLFFIYAIIGMQVFGNIGIDVEDEDSDEDEFQITEHNNFRTFFQALMLLFRSATGEAWHNIMLSCLSGKPCDKNSGILTRECGNEFAYFYFVSFIFLCSFLMLNLFVAVIMDNFEYLTRDSSILGPHHLDEYVRVWAEYDPAAWGRMPYLDMYQMLRHMSPPLGLGKKCPARVAYKRLLRMDLPVADDNTVHFNSTLMALIRTALDIKIAKGGADKQQMDAELRKEMMAIWPNLSQKTLDLLVTPHKSTDLTVGKIYAAMMIMEYYRQSKAKKLQAMREEQDRTPLMFQRMEPPSPTQEGGPGQNALPSTQLDPGGALMAHESGLKESPSWVTQRAQEMFQKTGTWSPEQGPPTDMPNSQPNSQSVEMREMGRDGYSDSEHYLPMEGQGRAASMPRLPAENQRRRGRPRGNNLSTISDTSPMKRSASVLGPKARRLDDYSLERVPPEENQRHHQRRRDRSHRASERSLGRYTDVDTGLGTDLSMTTQSGDLPSKERDQERGRPKDRKHRQHHHHHHHHHHPPPPDKDRYAQERPDHGRARARDQRWSRSPSEGREHMAHRQGSSSVSGSPAPSTSGTSTPRRGRRQLPQTPSTPRPHVSYSPVIRKAGGSGPPQQQQQQQQQQQQQAVARPGRAATSGPRRYPGPTAEPLAGDRPPTGGHSSGRSPRMERRVPGPARSESPRACRHGGARWPASGPHVSEGPPGPRHHGYYRGSDYDEADGPGSGGGEEAMAGAYDAPPPVRHASSGATGRSPRTPRASGPACASPSRHGRRLPNGYYPAHGLARPRGPGSRKGLHEPYSESDDDWC

SEQ ID NO: 709 - protein, 3677 aa, Homo sapiens
MEDEREDVQKKTFTKWVNAQFSKFGKQHIENLFSDLQDGRRLLDLLEGLTGQKLPKEKGSTRVHALNNVNKALRVLQNNNVDLVNIGSTDIVDGNHKLTLGLIWNIILHWQVKNVMKNIMAGLQQTNSEKILLSWVRQSTRNYPQVNVINFTTSWSDGLALNALIHSHRPDLFDWNSVVCQQSATQRLEHAFNIARYQLGIEKLLDPEDVDTTYPDKKSILMYITSLFQVLPQQVSIEAIQEVEMLPRPPKVTKEEHFQLHHQMHYSQQITVSLAQGYERTSSPKPRFKSYAYTQAAYVTTSDPTRSPFPSQHLEAPEDKSFGSSLMESEVNLDRYQTALEEVLSWLLSAEDTLQAQGEISNDVEVVKDQFHTHEGYMMDLTAHQGRVGNILQLGSKLIGTGKLSEDEETEVQEQMNLLNSRWECLRVASMEKQSNLHRVLMDLQNQKLKELNDWLTKTEERTRKMEEEPLGPDLEDLKRQVQQHKVLQEDLEQEQVRVNSLTHMVVVVDESSGDHATAALEEQLKVLGDRWANICRWTEDRWVLLQDILLKWQRLTEEQCLFSAWLSEKEDAVNKIHTTGFKDQNEMLSSLQKLAVLKADLEKKKQSMGKLYSLKQDLLSTLKNKSVTQKTEAWLDNFARCWDNLVQKLEKSTAQISQAVTTTQPSLTQTTVMETVTTVTTREQILVKHAQEELPPPPPQKKRQITVDSEIRKRLDVDITELHSWITRSEAVLQSPEFAIFRKEGNFSDLKEKVNAIEREKAEKFRKLQDASRSAQALVEQMVNEGVNADSIKQASEQLNSRWIEFCQLLSERLNWLEYQNNIIAFYNQLQQLEQMTTTAENWLKIQPTTPSEPTAIKSQLKICKDEVNRLSGLQPQIERLKIQSIALKEKGQGPMFLDADFVAFTNHFKQVFSDVQAREKELQTIFDTLPPMRYQETMSAIRTWVQQSETKLSIPQLSVTDYEIMEQRLGELQALQSSLQEQQSGLYYLSTTVKEMSKKAPSEISRKYQSEFEEIEGRWKKLSSQLVEHCQKLEEQMNKLRKIQNHIQTLKKWMAEVDVFLKEEWPALGDSEILKKQLKQCRLLVSDIQTIQPSLNSVNEGGQKIKNEAEPEFASRLETELKELNTQWDHMCQQVYARKEALKGGLEKTVSLQKDLSEMHEWMTQAEEEYLERDFEYKTPDELQKAVEEMKRAKEEAQQKEAKVKLLTESVNSVIAQAPPVAQEALKKELETLTTNYQWLCTRLNGKCKTLEEVWACWHELLSYLEKANKWLNEVEFKLKTTENIPGGAEEISEVLDSLENLMRHSEDNPNQIRILAQTLTDGGVMDELINEELETFNSRWRELHEEAVRRQKLLEQSIQSAQETEKSLHLIQESLTFIDKQLAAYIADKVDAAQMPQEAQKIQSDLTSHEISLEEMKKHNQGKEAAQRVLSQIDVAQKKLQDVSMKFRLFQKPANFEQRLQESKMILDEVKMHLPALETKSVEQEVVQSQLNHCVNLYKSLSEVKSEVEMVIKTGRQIVQKKQTENPKELDERVTALKLHYNELGAKVTERKQQLEKCLKLSRKMRKEMNVLTEWLAATDMELTKRSAVEGMPSNLDSEVAWGKATQKEIEKQKVHLKSITEVGEALKTVLGKKETLVEDKLSLLNSNWIAVTSRAEEWLNLLLEYQKHMETFDQNVDHITKWIIQADTLLDESEKKKPQQKEDVLKRLKAELNDIRPKVDSTRDQAANLMANRGDHCRKLVEPQISELNHRFAAISHRIKTGKASIPLKELEQFNSDIQKLLEPLEAEIQQGVNLKEEDFNKDMNEDNEGTVKELLQRGDNLQQRITDERKREEIKIKQQLLQTKHNALKDLRSQRRKKALEISHQWYQYKRQADDLLKCLDDIEKKLASLPEPRDERKIKEIDRELQKKKEELNAVRRQAEGLSEDGAAMAVEPTQIQLSKRWREIESKFAQFRRLNFAQIHTVREETMMVMTEDMPLEISYVPSTYLTEITHVSQALLEVEQLLNAPDLCAKDFEDLFKQEESLKNIKDSLQQSSGRIDIIHSKKTAALQSATPVERVKLQEALSQLDFQWEKVNKMYKDRQGRFDRSVEKWRRFHYDIKIFNQWLTEAEQFLRKTQIPENWEHAKYKWYLKELQDGIGQRQTVVRTLNATGEEIIQQSSKTDASILQEKLGSLNLRWQEVCKQLSDRKKRLEEQKNILSEFQRDLNEFVLWLEEADNIASIPLEPGKEQQLKEKLEQVKLLVEELPLRQGILKQLNETGGPVLVSAPISPEEQDKLENKLKQTNLQWIKVSRALPEKQGEIEAQIKDLGQLEKKLEDLEEQLNHLLLWLSPIRNQLEIYNQPNQEGPFDVQETEIAVQAKQPDVEEILSKGQHLYKEKPATQPVKRKLEDLSSEWKAVNRLLQELRAKQPDLAPGLTTIGASPTQTVTLVTQPVVTKETAISKLEMPSSLMLEVPALADFNRAWTELTDWLSLLDQVIKSQRVMVGDLEDINEMIIKQKATMQDLEQRRPQLEELITAAQNLKNKTSNQEARTIITDRIERIQNQWDEVQEHLQNRRQQLNEMLKDSTQWLEAKEEAEQVLGQARAKLESWKEGPYTVDAIQKKITETKQLAKDLRQWQTNVDVANDLALKLLRDYSADDTRKVHMITENINASWRSIHKRVSEREAALEETHRLLQQFPLDLEKFLAWLTEAETTANVLQDATRKERLLEDSKGVKELMKQWQDLQGEIEAHTDVYHNLDENSQKILRSLEGSDDAVLLQRRLDNMNFKWSELRKKSLNIRSHLEASSDQWKRLHLSLQELLVWLQLKDDELSRQAPIGGDFPAVQKQNDVHRAFKRELKTKEPVIMSTLETVRIFLTEQPLEGLEKLYQEPRELPPEERAQNVTRLLRKQAEEVNTEWEKLNLHSADWQRKIDETLERLQELQEATDELDLKLRQAEVIKGSWQPVGDLLIDSLQDHLEKVKALRGEIAPLKENVSHVNDLARQLTTLGIQLSPYNLSTLEDLNTRWKLLQVAVEDRVRQLHEAHRDFGPASQHFLSTSVQGPWERAISPNKVPYYINHETQTTCWDHPKMTELYQSLADLNNVRFSAYRTAMKLRRLQKALCLDLLSLSAACDALDQHNLKQNDQPMDILQIINCLTTIYDRLEQEHNNLVNVPLCVDMCLNWLLNVYDTGRTGRIRVLSFKTGIISLCKAHLEDKYRYLFKQVASSTGFCDQRRLGLLLHDSIQIPRQLGEVASFGGSNIEPSVRSCFQFANNKPEIEAALFLDWMRLEPQSMVWLPVLHRVAAAETAKHQAKCNICKECPIIGFRYRSLKHFNYDICQSCFFSGRVAKGHKMHYPMVEYCTPTTSGEDVRDFAKVLKNKFRTKRYFAKHPRMGYLPVQTVLEGDNMETPVTLINFWPVDSAPASSPQLSHDDTHSRIEHYASRLAEMENSNGSYLNDSISPNESIDDEHLLIQHYCQSLNQDSPLSQPRSPAQILISLESEERGELERILADLEEENRNLQAEYDRLKQQHEHKGLSPLPSPPEMMPTSPQSPRDAELIAEAKLLRQHKGRLEARMQILEDHNKQLESQLHRLRQLLEQPQAEAKVNGTTVSSPSTSLQRSDSSQPMLLRVVGSQTSDSMGEEDLLSPPQDTSTGLEEVMEQLNNSFPSSRGRNTPGKPMREDTM

SEQ ID NO: 710 - protein, 1357 aa, Homo sapiens
MQTLGSFFGSLPGFSSARNLVANAHSSARARPAADPTGAPAAEAAQPQAQVAAHPEQTAPWTEKELQPSEKQMVSGAKDLVCSKMSRAKDAVSSGVASVVDVAKGVVQGGLDTTRSALTGTKEVVSSGVTGAMDMAKGAVQGGLDTSKAVLTGTKDTVSTGLTGAVNVAKGTVQAGVDTTKTVLTGTKDTVTTGVMGAVNLAKGTVQTGVETSKAVLTGTKDAVSTGLTGAVNVARGSIQTGVDTSKTVLTGTKDTVCSGVTGAMNVAKGTIQTGVDTSKTVLTGTKDTVCSGVTGAMNVAKGTIQTGVDTSKTVLTGTKDTVCSGVTGAMNVAKGTIQTGVDTTKTVLTGTKNTVCSGVTGAVNLAKEAIQGGLDTTKSMVMGTKDTMSTGLTGAANVAKGAMQTGLNTTQNIATGTKDTVCSGVTGAMNLARGTIQTGVDTTKIVLTGTKDTVCSGVTGAANVAKGAVQGGLDTTKSVLTGTKDAVSTGLTGAVNVAKGTVQTGVDTTKTVLTGTKDTVCSGVTSAVNVAKGAVQGGLDTTKSVVIGTKDTMSTGLTGAANVAKGAVQTGVDTAKTVLTGTKDTVTTGLVGAVNVAKGTVQTGMDTTKTVLTGTKDTIYSGVTSAVNVAKGAVQTGLKTTQNIATGTKNTFGSGVTSAVNVAKGAAQTGVDTAKTVLTGTKDTVTTGLMGAVNVAKGTVQTSVDTTKTVLTGTKDTVCSGVTGAANVAKGAIQGGLDTTKSVLTGTKDAVSTGLTGAVKLAKGTVQTGMDTTKTVLTGTKDAVCSGVTGAANVAKGAVQMGVDTAKTVLTGTKDTVCSGVTGAANVAKGAVQTGLKTTQNIATGTKNTLGSGVTGAAKVAKGAVQGGLDTTKSVLTGTKDAVSTGLTGAVNLAKGTVQTGVDTSKTVLTGTKDTVCSGVTGAVNVAKGTVQTGVDTAKTVLSGAKDAVTTGVTGAVNVAKGTVQTGVDASKAVLMGTKDTVFSGVTGAMSMAKGAVQGGLDTTKTVLTGTKDAVSAGLMGSGNVATGATHTGLSTFQNWLPSTPATSWGGLTSSRTTDNGGEQTALSPQEAPFSGISTPPDVLSVGPEPAWEAAATTKGLATDVATFTQGAAPGREDTGLLATTHGPEEAPRLAMLQNELEGLGDIFHPMNAEEQAQLAASQPGPKVLSAEQGSYFVRLGDLGPSFRQRAFEHAVSHLQHGQFQARDTLAQLQDCFRLIEKAQQAPEGQPRLDQGSGASAEDAAVQEERDAGVLSRVCGLLRQLHTAYSGLVSSLQGLPAELQQPVGRARHSLCELYGIVASAGSVEELPAERLVQSREGVHQAWQGLEQLLEGLQHNPPLSWLVGPFALPAGGQ

SEQ ID NO: 711 - protein, 2151 aa, Homo sapiens
MLSSGVETQPVPLDSSMSAVVQELYSELPVSVSRELHADPEPSVIPDVKPGASSSLLSQNRALPLELQRTHVESCCEETYETLDHGSEPGRCGLVDSTAGGSVASGILDRAKRSESMEPKVFRDPGGQAGIIREPSEGAKEDPHQHSTAAEEKTSPSQEDLLMQSSKELSHVDLPEDFLRSKEGNVQITAETLLKSAEVQGMKVNGTKTDNNEGHKNGNVSKDLSAGCGEFQEVDKIMTSDEVSETSTLVTPEPLTFVDPVLTEATPKEKECEELKSCPWLSLPGNSAISNVDNGKEELCKPNLVCEADDNHQQLHGHHNEQPSSTHDSPTATSPLKENSEVSCFTSDLSGPESRTISLENCGFEGGGLLKRSAEKTDSSYFYRGDDQGKNLASREENEERLLIPRSERGGPFLFNAREPEKEISGRCSGEKEPVVSPKENIHNNCIQDSLHTGNSSSLMPNSFTEATEVMLNKNDLKITVHVQGNLTNPEDHKETFTNMSHPGGHSEESSFSSLMQIEEAGQTTPVEPNILSKSFYTKDCNSLVSIQRNLEGNTQLNEASCNDFLFERKSIVSLMPEDQISPVSEVLKPKQGTALLLPSPEFDYRPESEKVIQTSHDDIPLLDEQSIACEMNELSCTNELVVNKVESECVLNQQVSLNSQEHANLPTDSLLHLNKEMPLATGRDAHQSHHPPLEGRADVIADIQTIPIQTKIKDISPPGNQTCGASSNCPTLNIKPVSLERKKEMADSGTKALHSRLRSNKREAAGFPQVVSVIECHSVQSQDISSCHRVRKNVSQENMCSASAAFKSSKISLQVDNSLITKYENAFQHRDHCCQGTGHSVEKSSCKVSYTSQERELDGKETNGSLPGDKIRNKMVAGLLNSGISNKTIHTSSSIKLSEEGLEGKEQDVSKETVFCKYNISDHAIQELNQTVNIPGPEKVLDQSPTVMFSSFKNVKSVETLDQKADEVLDCQSNQNRPDECKSEGQSAKEMLSSDQRETVTEPHGEVNHNQKDLLVSSGSNNSLPCGSPKKCNLKGAFVKMSGCDESTEGMVDIVYTDCSNKLAEGVLDVKASNLLDCGARQEKLAFQEDSRSTLSRRELDAAHTGTTGQDSDFPVTAASTVDFLKIKKSCEENVCRSLKDCEMEKCPDSCAHEMESVADHEPNKRILGRVNLSLNDSHYGQQDKGTSLRETQEMTEGSRLEPNSEFGKESTFGISSKESMSCHDESSVSLRSLKSIEIMPSQENSETNVNSEETDLKNLCKPKDGEMLCENVKDCTVLPEMKEIVSRDWSNSSDRDSVCTCVEKNACKACHPHENSSDRHLPLTVKTDIKVKGEETEEHQRGRLGYLTVGEQSEELVTRETGDGDPVSNISQTHFKCRGILNHAEKQQSPEVLDYMLQKEEKYIRQQKAHTISQQCISSSLLLDDAQNQNQPKADKDESTMINEITLAKLAKDSIVAQTQKLEDQKEERLHHPLRKDTESCTSPCLLGAPRKAQDPSSAGCDQIHGAFAKKGVLPLKKQPHRTCKKVSYQEQIIVGRKIGKIRSSAFLKSSSNPIPTKAHRLLSLCTLSAPTRLEPETAPTKSLVSHIPKQMSTPCHPLRSLNFRKTTKESALLNKLSILASKLAPAMKTQKLRYRRCSSELLPMAKSYKRLRYKRLLDGFSSSTEQLNPYLAASGWDKRPNSKPMALYSLESIKMTFIDLSNKMPSLLFGSEIFPVSFHVKSSSSDCTTESSRTFPEHCAPARLALGEALQCPSQPPKWTFSFFLSHGCPGMATFREDTGVHSQTHTQAPPQPPAPLQDYGGTAIVQTRADCSVLGLHTLLALCSPGCYRIWTKKRSFSSHMPTMQRLFMTQFTQGLKGLRSPASIADKVFCSLPYSVGRVLSIWSQHGPSVCSFEISSLHSPHCKRQPSLGTTSSHTMLPYVPLPGMEATYNTSGSQTRLEPPFPALVPKSCLVAESAVSKLLLSASEFQVRGLDELDGVKAACPCPQSSPPEQKEAEPEKRPKKVSQIRIRKTIPRPDPNLTPMGLPRPKRLKKKEFSLEEIYTNKNYKSPPANRCLETIFEEPKERNGTLISISQQKRKRVLEFQDFTVPRKRRARGKVKVAGSFTRAQKAAVQSRELDALLIQKLMELETFFAKEEEQEQSSGC

SEQ ID NO: 712 - protein, 1906 aa, Homo sapiens
MAAQGSPSSSPSDDSTTSGSLPELPPTSTATSRSPPESKGSSRSSLLQWTCPEDSLPLAVFYGPLDAKNPLLASCEKEIQELLGFMRKKKALATTEEEKHEFRRRCATSLFNIWTKYAPRLPADYYNEKLLKVGDSLCQMKEYKLALLQCYGRYLQQFNTNFDENKVDVTQFKATFFPKGFKDKTAGLTFHALSGKNMCNYQLVCDSDENLKNKESVVQCLHILSSLRLIMQVALPQEHLCWIIFNGTIYIYTICRKLMVIGQSSKALEYLLWASMCMESLVPLLSLRYLTWRATLYTAVCQCCYDCHAGIHGEAFARRALAKIDELRQLELMSSSKSQEESRRYFREATMKMAVMIFKRGVFESRRKNKAVFRPKIRINLREVQTLSWPRTVTERLLDEMFDSTASQFLAVLEALSDSNRRILQTGPIVTDEVEIHDVVSELFMAGKELLIMSNIGADGMLDFPKTSLLELMIGRKDVISVDAAVKFIKLAFTYEEWSLFESSAVHLIYFLQRQDDPESKKAEKDLTLLIAMEPLINVKRNKGLIFPLENYKEGQSTQIYLKKIAVHDTCLKTCGYSEDIFHLAATLYVCVCTAPQDVQPDKEIVVDTIMFLWQKCKLGIQRLNISRNDYAKFTQKISTNKWIYLLWQINEVIHCYKMEDIDIVVVAEVTLRLSEILESLGSPGRKFKQSLVLQTPTVSKDISTKGPEKLKQSGSTDCFTELNIMNKIKKNTLSKAIYLMQKALLIFEKDATSTSSWELLMEAYSLIQRIEAEQNALYSYQKYLESSKRKKSRVPPPPILLSRTHCSVTLKPAPFTSEVKAHFSRRQVSWYCILGCKAEGSYGKVRLNNNHLPNSGEAIPADGKSVFEVKGLETNEKYVFAVAAYSNNGKLVGGAIGETTKPILVYPPLSTITARMFLTQVAYQVGNYELAKKVFSPVWDYFVASPLQDEQSVICLSNIITITQRRNIFVTSDIKIKEENLFCDNIKGNEIFPSQQIARLIECERVLVALELSNFLNDSSYALQAVTQCYGLLAPIIYHNIVLVPVVQILRSWREYDLAVMIINYGKKMLDITPGCKSLFDGSNEQEEMPEEDSSKKSLKTKKPQQILLPEKINEQLALLETHLLKLTKQYVTSELSGGEDPIFLYPVVLNWSVKGAVKEVMKFKQKPRFLEFFTQVMLKCMNEEKFHLMVEVTTPVHDFLKRRNESLLGLIKVKYKDSALNKKANKSLKFKAAVMEIGRSAEMQQRIRSKKKETLRDFIFKNPAISEMVAHERNRRTSVRKAAQRYLMDYLNPLILSYVKRKRFHRLSLEEMPWRAQMNLYLAGAHFNLVLQKLWECTKMKFGTSHMMVSFRSCDPNMFSLYNSGTVLPTRKLTVENYKAMLDFLLTAKKRKANLPSDAEEFSTFINSIMSDENMSKTQTVYDSDSQSGSSAKEKDRGANLCVMDHFMKIFLYCRRAMVLAHRGGYWTLLQNCCRALWNFTQELQILLKQAVDLDKTFPISQDGFLCTSVLPFYLGAELLIDMLIQLQNTSSIKPIEDKGEFSVPSCYGNIKNDNGGSSLTFEHPLDDVNVVDLKWIHDFVLKSLEVLYQVEKWETLVSLAIQFNTVSHERYTEQVTPLLVYAQRQLLLRIQKFKGPDITQQPCARYEAEYGEKITCRNFIGKQLKINSSTIEATSNCTDLLKMLISSEYSRAKALVCVPVDVTDTLRCFRETLEKSKYHNRSIRHSRKLLSLFLAQTQGEKGEINDSKCTSGKVEFCLGTEEMHMSIPPDLSQEHFRVFSSVEKSKLPYSQLGLVISSYHQTIDVLQASNQRSLKVQALHSLGSLLIFAEKKRAAFKCWCQALDDIFRKPDVLHTWKEFGPSLTNVTNSHSPPGFKDYSEEFLSRVGIWGCLQGAVISAKIAQ

SEQ ID NO: 713 - protein, 2157 aa, Homo sapiens
MSVKEAGSSGRREQAAYHLHIYPQLSTTESQASCRVTATKDSTTSDVIKDAIASLRLDGTKCYVLVEVKESGGEEWVLDANDSPVHRVLLWPRRAQDEHPQEDGYYFLLQERNADGTIKYVHMQLVAQATATRRLVERGLLPRQQADFDDLCNLPELTEGNLLKNLKHRFLQQKIYTYAGSILVAINPFKFLPIYNPKYVKMYENQQLGKLEPHVFALADVAYYTMLRKRVNQCIVISGESGSGKTQSTNFLIHCLTALSQKGYASGVERTILGAGPVLEAFGNAKTAHNNNSSRFGKFIQVSYLESGIVRGAVVEKYLLEKSRLVSQEKDERNYHVFYYLLLGVSEEERQEFQLKQPEDYFYLNQHNLKIEDGEDLKHDFERLKQAMEMVGFLPATKKQIFAVLSAILYLGNVTYKKRATGREEGLEVGPPEVLDTLSQLLKVKREILVEVLTKRKTVTVNDKLILPYSLSEAITARDSMAKSLYSALFDWIVLRINHALLNKKDVEEAVSCLSIGVLDIFGFEDFERNSFEQFCINYANEQLQYYFNQHIFKLEQEEYQGEGITWHNIGYTDNVGCIHLISKKPTGLFYLLDEESNFPHATSQTLLAKFKQQHEDNKYFLGTPVMEPAFIIQHFAGKVKYQIKDFREKNMDYMRPDIVALLRGSDSSYVRELIGMDPVAVFRWAVLRAAIRAMAVLREAGRLRAERAEKAAGMSSPGAQSHPEELPRGASTPSEKLYRDLHNQMIKSIKGLPWQGEDPRSLLQSLSRLQKPRAFILKSKGIKQKQIIPKNLLDSKSLKLIISMTLHDRTTKSLLHLHKKKKPPSISAQFQTSLNKLLEALGKAEPFFIRCIRSNAEKKELCFDDELVLQQLRYTGMLETVRIRRSGYSAKYTFQDFTEQFQVLLPKDAQPCREVISTLLEKMKIDKRNYQIGKTKVFLKETERQALQETLHREVVRKILLLQSWFRMVLERRHFLQMKRAAVTIQACWRSYRVRRALERTQAAVYLQASWRGYWQRKLYRHQKQSIIRLQSLCRGHLQRKSFSQMISEKQKAEEKEREALEAARAGAEEGGQGQAAGGQQVAEQGPEPAEDGGHLASEPEVQPSDRSPLEHSSPEKEAPSPEKTLPPQKTVAAESHEKVPSSREKRESRRQRGLEHVKFQNKHIQSCKEESALREPSRRVTQEQGVSLLEDKKESREDETLLVVETEAENTSQKQPTEQPQAMAVGKVSEETEKTLPSGSPRPGQLERPTSLALDSRVSPPAPGSAPETPEDKSKPCGSPRVQEKPDSPGGSTQIQRYLDAERLASAVELWRGKKLVAAASPSAMLSQSLDLSDRHRATGAALTPTEERRTSFSTSDVSKLLPSLAKAQPAAETTDGERSAKKPAVQKKKPGDASSLPDAGLSPGSQVDSKSTFKRLFLHKTKDKKYSLEGAEELENAVSGHVVLEATTMKKGLEAPSGQQHRHAAGEKRTKEPGGKGKKNRNVKIGKITVSEKWRESVFRQITNANELKYLDEFLLNKINDLRSQKTPIESLFIEATEKFRSNIKTMYSVPNGKIHVGYKDLMENYQIVVSNLATERGQKDTNLVLNLFQSLLDEFTRGYTKNDFEPVKQSKAQKKKRKQERAVQEHNGHVFASYQVSIPQSCEQCLSYIWLMDKALLCSVCKMTCHKKCVHKIQSHCSYTYGRKGEPGVEPGHFGVCVDSLTSDKASVPIVLEKLLEHVEMHGLYTEGLYRKSGAANRTRELRQALQTDPAAVKLENFPIHAITGVLKQWLRELPEPLMTFAQYGDFLRAVELPEKQEQLAAIYAVLEHLPEANHNSLERLIFHLVKVALLEDVNRMSPGALAIIFAPCLLRCPDNSDPLTSMKDVLKITTCVEMLIKEQMRKYKVKMEEISQLEAAESIAFRRLSLLRQNAPWPLKLGFSSPYEGVLNKSPKTRDIQEEELEVLLEEEAAGGDEDREKEILIERIQSIKEEKEDITYRLPELDPRGSDEENLDSETSASTESLLEERAGRGASEGPPAPALPCPGAPTPSPLPTVAAPPRRRPSSFVTVRVKTPRRTPIMPTANIKLPPGLPSHLPRWAPGAREAAAPVRRREPPARRPDQIHSVYITPGADLPVQGALEPLEEDGQPPGAKRRYSDPPTYCLPPASGQTNG

SEQ ID NO: 714 - protein, 3080 aa, Homo sapiens
MKEHIIYQKLYGLILMSSFIFLSDTLSLKGKKLDFFGRGDTYVSLIDTIPELSRFTACIDLVFMDDNSRYWMAFSYITNNALLGREDIDLGLAGDHQQLILYRLGKTFSIRHHLASFQWHTICLIWDGVKGKLELFLNKERILEVTDQPHNLTPHGTLFLGHFLKNESSEVKSMMRSFPGSLYYFQLWDHILENEEFMKCLDGNIVSWEEDVWLVNKIIPTVDRTLRCFVPENMTIQEKSTTVSQQIDMTTPSQITGVKPQNTAHSSTLLSQSIPIFATDYTTISYSNTTSPPLETMTAQKILKTLVDETATFAVDVLSTSSAISLPTQSISIDNTTNSMKKTKSPSSESTKTTKMVEAMATEIFQPPTPSNFLSTSRFTKNSVVSTTSAIKSQSAVTKTTSLFSTIESTSMSTTPCLKQKSTNTGALPISTAGQEFIESTAAGTVPWFTVEKTSPASTHVGTASSFPPEPVLISTAAPVDSVFPRNQTAFPLATTDMKIAFTVHSLTLPTRLIETTPAPRTAETELTSTNFQDVSLPRVEDAMSTSMSKETSSKTFSFLTSFSFTGTESVQTVIDAEATRTALTPEITLASTVAETMLSSTITGRVYTQNTPTADGHLLTLMSTRSASTSKAPESGPTSTTDEAAHLFSSNETIWTSRPDQALLASMNTTTILTFVPNENFTSAFHENTTYTEYLSATTNITPLKASPEGKGTTANDATTARYTTAVSKLTSPWFANFSIVSGTTSITNMPEFKLTTLLLKTIPMSTKPANELPLTPRETVVPSVDIISTLACIQPNFSTEESASETTQTEINGAIVFGGTTTPVPKSATTQRLNATVTRKEATSHYLMRKSTIAAVAEVSPFSTMLEVTDESAQRVTASVTVSSFPDIEKLSTPLDNKTATTEVRESWLLTKLVKTTPRSSYNEMTEMFNFNHTYVAHWTSETSEGISAGSPTSGSTHIFGEPLGASTTRISETSFSTTPTDRTATSLSDGILPPQPTAAHSSATPVPVTHMFSLPVNGSSVVAEETEVTMSEPSTLARAFSTSVLSDVSNLSSTTMTTALVPPLDQTASTTIVIVPTHGDLIRTTSEATVISVRKTSMAVPSLTETPFHSLRLSTPVTAKAETTLFSTSVDTVTPSTHTLVCSKPPPDNIPPASSTHVISTTSTPEATQPISQVEETSTYALSFPYTFSGGGVVASLATGTTETSVVDETTPSHISANKLTTSVNSHISSSATYRVHTPVSIQLVTSTSVLSSDKDQMTISLGKTPRTMEVTEMSPSKNSFISYSRGTPSLEMTDTGFPETTKISSHQTHSPSEIPLGTPSDGNLASSPTSGSTQITPTLTSSNTVGVHIPEMSTSLGKTALPSQALTITTFLCPEKESTSALPAYTPRTVEMIVNSTYVTHSVSYGQDTSFVDTTTSSSTRISNPMDINTTFSHLHSLRTQPEVTSVASFISESTQTFPESLSLSTAGLYNDGFTVLSDRITTAFSVPNVPTMLPRESSMATSTPIYQMSSLPVNVTAFTSKKVSDTPPIVITKSSKTMHPGCLKSPCTATSGPMSEMSSIPVNNSAFTPATVSSDTSTRVGLFSTLLSSVTPRTTMTMQTSTLDVTPVIYAGATSKNKMVSSAFTTEMIEAPSRITPTTFLSPTEPTLPFVKTVPTTIMAGIVTPFVGTTAFSPLSSKSTGAISSIPKTTFSPFLSATQQSSQADEATTLGILSGITNRSLSTVNSGTGVALTDTYSRITVPENMLSPTHADSLHTSFNIQVSPSLTSFKSASGPTKNVKTTTNCFSSNTRKMTSLLEKTSLTNYATSLNTPVSYPPWTPSSATLPSLTSFVYSPHSTEAEISTPKTSPPPTSQMVEFPVLGTRMTSSNTQPLLMTSWNIPTAEGSQFPISTTINVPTSNEMETETLHLVPGPLSTFTASQTGLVSKDVMAMSSIPMSGILPNHGLSENPSLSTSLRAITSTLADVKHTFEKMTTSVTPGTTLPSILSGATSGSVISKSPILTWLLSSLPSGSPPATVSNAPHVMTSSTVEVSKSTFLTSDMISAHPFTNLTTLPSATMSTILTRTIPTPTLGGITTGFPTSLPMSINVTDDIVYISTHPEASSRTTITANPRTVSHPSSFSRKTMSPSTTDHTLSVGAMPLPSSTITSSWNRIPTASSPSTLIIPKPTLDSLLNIMTTTSTVPGASFPLISTGVTYPFTATVSSPISSFFETTWLDSTPSFLSTEASTSPTATKSTVSFYNVEMSFSVFVEEPRIPITSVINEFTENSLNSIFQNSEFSLATLETQIKSRDISEEEMVMDRAILEQREGQEMATISYVPYSCVCQVIIKASSSLASSELMRKIKSKIHGNFTHGNFTQDQLTLLVNCEHVAVKKLEPGNCKADETASKYKGTYKWLLTNPTETAQTRCIKNEDGNATRFCSISINTGKSQWEKPKFKQCKLLQELPDKIVDLANITISDENAEDVAEHILNLINESPALGKEETKIIVSKISDISQCDEISMNLTHVMLQIINVVLEKQNNSASDLHEISNEILRIIERTGHKMEFSGQIANLTVAGLALAVLRGDHTFDGMAFSIHSYEEGTDPEIFLGNVPVGGILASIYLPKSLTERIPLSNLQTILFNFFGQTSLFKTKNVTKALTTYVVSASISDDMFIQNLADPVVITLQHIGGNQNYGQVHCAFWDFENNNGLGGWNSSGCKVKETNVNYTICQCDHLTHFGVLMDLSRSTVDSVNEQILALITYTGCGISSIFLGVAVVTYIAFHKLRKDYPAKILINLCTALLMLNLVFLINSWLSSFQKVGVCITAAVALHYFLLVSFTWMGLEAVHMYLALVKVFNIYIPNYILKFCLVGWGIPAIMVAITVSVKKDLYGTLSPTTPFCWIKDDSIFYISVVAYFCLIFLMNLSMFCTVLVQLNSVKSQIQKTRRKMILHDLKGTMSLTFLLGLTWGFAFFAWGPMRNFFLYLFAIFNTLQGFFIFVFHCVMKESVREQWQIHLCCGWLRLDNSSDGSSRCQIKVGYKQEGLKKIFEHKLLTPSLKSTATSSTFKSLGSAQGTPSEISFPNDDFDKDPYCSSP

SEQ ID NO: 715 - protein, 279 aa, Homo sapiens
MEFGLSWVFLVAILKGVQCEVQLVESGGVVVQPGGSLRLSCAASGFTFDDYAMHWVRQAPGKGLEWVSLISWDGGSTYYADSVKGRFTISRDNSKNSLYLQMNSLRAEDTALYYCAKDTHENPGESWQGEGYSSGFTFSDFWMHWIRQASGKGLEWVGRIRTKRNSYTTECAASVKGRFTISRDDSKNTLYMQMNTLKTKYTAIYYSPGQGLEWMGWIITYTGNPMYTHGFTGRFVFSMDTSVSMAYLQISSLKAEDTAVYDSMRDTVWKPTSRESQKP

SEQ ID NO: 716 - protein, 186 aa, Homo sapiens
MEFGLSWVFLVAIIKGVQCQVQLVESGGGLVKPGGSLRLSCAASGFTFSDYYMSWIRQAPGKGLEWVSYISSSSSYTNYADSVKGRFTISRDNAKNSLYLQMNSLRAEDTAVYYCARDTVRGGQCEPRHKPPCRGPQDHQGAPGTLCTGLSPGQVQVLLRAGFLSWPGAASLSNFPRNFSRFTILY

SEQ ID NO: 717 - protein, 2406 aa, Homo sapiens
MDPEQSVKGTKKAEGSPRKRLTKGEAIQTSVSSSVPYPGSGTAATQESPAQELLAPQPFPGPSSVLREGSQEKTGQQQKPPKRPPIEASVHISQLPQHPLTPAFMSPGKPEHLLEGSTWQLVDPMRPGPSGSFVAPGLHPQSQLLPSHASIIPPEDLPGVPKVFVPRPSQVSLKPTEEAHKKERKPQKPGKYICQYCSRPCAKPSVLQKHIRSHTGERPYPCGPCGFSFKTKSNLYKHRKSHAHRIKAGLASGMGGEMYPHGLEMERIPGEEFEEPTEGESTDSEEETSATSGHPAELSPRPKQPLLSSGLYSSGSHSSSHERCSLSQSSTAQSLEDPPPFVEPSSEHPLSHKPEDTHTIKQKLALRLSERKKVIDEQAFLSPGSKGSTESGYFSRSESAEQQVSPPNTNAKSYAEIIFGKCGRIGQRTAMLTATSTQPLLPLSTEDKPSLVPLSVPRTQVIEHITKLITINEAVVDTSEIDSVKPRRSSLSRRSSMESPKSSLYREPLSSHSEKTKPEQSLLSLQHPPSTAPPVPLLRSHSMPSAACTISTPHHPFRGSYSFDDHITDSEALSHSSHVFTSHPRMLKRQPAIELPLGGEYSSEEPGPSSKDTASKPSDEVEPKESELTKKTKKGLKTKGVIYECNICGARYKKRDNYEAHKKYYCSELQIAKPISAGTHTSPEAEKSQIEHEPWSQMMHYKLGTTLELTPLRKRRKEKSLGDEEEPPAFESTKSQFGSPGPSDAARNLPLESTKSPAEPSKSVPSLEGPTGFQPRTPKPGSGSESGKERRTTSKEISVIQHTSSFEKSDSLEQPSGLEGEDKPLAQFPSPPPAPHGRSAHSLQPKLVRQPNIQVPEILVTEEPDRPDTEPEPPPKEPEKTEEFQWPQRSQTLAQLPAEKLPPKKKRLRLAEMAQSSGESSFESSVPLSRSPSQESNVSLSGSSRSASFERDDHGKAEAPSPSSDMRPKPLGTHMLTVPSHHPHAREMRRSASEQSPNVSHSAHMTETRSKSFDYGSLSLTGPSAPAPVAPPARVAPPERRKCFLVRQASLSRPPESELEVAPKGRQESEEPQPSSSKPSAKSSLSQISSAATSHGGPPGGKGPGQDRPPLGPTVPYTEALQVFHHPVAQTPLHEKPYLPPPVSLFSFQHLVQHEPGQSPEFFSTQAMSSLLSSPYSMPPLPPSLFQAPPLPLQPTVLHPGQLHLPQLMPHPANIPFRQPPSFLPMPYPTSSALSSGFFLPLQSQFALQLPGDVESHLPQIKTSLAPLATGSAGLSPSTEYSSDIRLPPVAPPASSSAPTSAPPLALPACPDTMVSLVVPVRVQTNMPSYGSAMYTTLSQILVTQSQGSSATVALPKFEEPPSKGTTVCGADVHEVGPGPSGLSEEQSRAFPTPYLRVPVTLPERKGTSLSSESILSLEGSSSTAGGSKRVLSPAGSLELTMETQQQKRVKEEEASKADEKLELVKPCSVVLTSTEDGKRPEKSHLGNQGQGRRELEMLSSLSSDPSDTKEIPPLPHPALSHGTAPGSEALKEYPQPSGKPHRRGLTPLSVKKEDSKEQPDLPSLAPPSSLPLSETSSRPAKSQEGTDSKKVLQFPSLHTTTNVSWCYLNYIKPNHIQHADRRSSVYAGWCISLYNPNLPGVSTKAALSLLRSKQKVSKETYTMATAPHPEAGRLVPSSSRKPRMTEVHLPSLVSPEGQKDLARVEKEEERRGEPEEDAPASQRGEPARIKIFEGGYKSNEEYVYVRGRGRGKYVCEECGIRCKKPSMLKKHIRTHTDVRPYVCKHCHFAFKTKGNLTKHMKSKAHSKKCQETGVLEELEAEEGTSDDLFQDSEGREGSEAVEEHQFSDLEDSDSDSDLDEDEDEDEEESQDELSRPSSEAPPPGPPHALRADSSPILGPQPPDAPASGTEATRGSSVSEAERLTASSCSMSSQSMPGLPWLGPAPLGSVEKDTGSALSYKPVSPRRPWSPSKEAGSRPPLARKHSLTKNDSSPQRCSPAREPQASAPSPPGLHVDPGRGMGALPCGSPRLQLSPLTLCPLGRELAPRAHVLSKLEGTTDPGLPRYSPTRRWSPGQAESPPRSAPPGKWALAGPGSPSAGEHGPGLGLDPRVLFPPAPLPHKLLSRSPETCASPWQKAESRSPSCSPGPAHPLSSRPFSALHDFHGHILARTEENIFSHLPLHSQHLTRAPCPLIPIGGIQMVQARPGAHPTLLPGPTAAWVSGFSGGGSDLTGAREAQERGRWSPTESSSASVSPVAKVSKFTLSSELEGGDYPKERERTGGGPGRPPDWTPHGTGAPAEPTPTHSPCTPPDTLPRPPQGRRAAQSWSPRLESPRAPTNPEPSATPPLDRSSSVGCLAEASARFPARTRNLSGEPRTRQDSPKPSGSGEPRAHPHQPEDRVPPNA

SEQ ID NO: 718 - protein, 1257 aa, Homo sapiens
MQKGIRLNDGHVASLGLLARKDGTRKGYLSKRSSDNTKWQTKWFALLQNLLFYFESDSSSRPSGLYLLEGCVCDRAPSPKPALSAKEPLEKQHYFTVNFSHENQKALELRTEDAKDCDEWVAAIAHASYRTLATEHEALMQKYLHLLQIVETEKTVAKQLRQQIEDGEIEIERLKAEITSLLKDNERIQSTQTVAPNDEDSDIKKIKKVQSFLRGWLCRRKWKTIIQDYIRSPHADSMRKRNQVVFSMLEAEAEYVQQLHILVNNFLRPLRMAASSKKPPITHDDVSSIFLNSETIMFLHQIFYQGLKARISSWPTLVLADLFDILLPMLNIYQEFVRNHQYSLQILAHCKQNRDFDKLLKHYEAKPDCEERTLETFLTYPMFQIPRYILTLHELLAHTPHEHVERNSLDYAKSKLEELSRIMHDEVSETENIRKNLAIERMIIEGCEILLDTSQTFVRQGSLIQVPMSEKGKITRGRLGSLSLKKEGERQCFLFSKHLIICTRGSGGKLHLTKNGVISLIDCTLLEEPESTEEEAKGSGQDIDHLDFKIGVEPKDSPPFTVILVASSRQEKAAWTSDISQCVDNIRCNGLMMNAFEENSKVTVPQMIKSDASLYCDDVDIRFSKTMNSCKVLQIRYASVERLLERLTDLRFLSIDFLNTFLHSYRVFTTAIVVLDKLITIYKKPISAIPARSLELLFASGQNNKLLYGEPPKSPRATRKFSSPPPLSITKTSSPSRRRKLSLNIPIITGGKALDLAALSCNSNGYTSMYSAMSPFSKATLDTSKLYVSSSFTNKIPDEGDTTPEKPEDPSALSKQSSEVSMREESDIDQNQSDDGDTETSPTKSPTTPKSVKNKNSSEFPLFSYNNGVVMTSCRELDNNRSALSAASAFAIATAGANEGTPNKEKYRRMSLASAGFPPDQRNGDKEFVIRRAATNRVLNVLRHWVSKHSQDFETNDELKCKVIGFLEEVMHDPELLTQERKAAANIIRTLTQEDPGDNQITLEEITQMAEGVKAEPFENHSALEIAEQLTLLDHLVFKKIPYEEFFGQGWMKLEKNERTPYIMKTTKHFNDISNLIASEIIRNEDINARVSAIEKWVAVADICRCLHNYNAVLEITSSMNRSAIFRLKKTWLKVSKQTKALIDKLQKLVSSEGRFKNLREALKNCDPPCVPYLGMYLTDLAFIEEGTPNYTEDGLVNFSKMRMISHIIREIRQFQQTAYKIEHQAKVTQYLLDQSFVMDEESLYESSLRIEPKLPT

SEQ ID NO: 719 - protein, 1826 aa, Homo sapiens
MGHASGSHFLSESPSKPHCTLEGKGTRLHKKQHMLSFHFWKSRGQPTDAASSVADGIQTPRCCRRCQANNWTGQLSYRTLATVSAGAAAPQPQTTSTASSRSLPTSLRLAAAPPQGLKNWEVVAAVAAVPTALGPVQIRGTLLRATLQPLRGQRRTQDFPSDHHCLFLSLKPGQGLIMEAAPPELNSKARQAEVGDGVSSAQDSQELKQQLWPLPKPSASSQREAKYVDMCASAEVQRESPQTMKLTLGHCPGGQRASRSPKEKAQDEPSSKTPSPQNNPASSQLSRSQHSASEEGGNFSSSSSSSPMNKAEEDGLSKMEDSTTSTGALATSSSSLGFESESGESEGCQAVGGEGEKISGGGGGGKGGGGGGAGDGTECRDIIAKSQGSRDPPKVEEAHYITTHEIQLSEVEQDMDFDVGLASRWDFEDNNVIYSFVDYASFGGSDETPGDITSLTEEDDDNSCYLSTTPSTNTTRTPSPTSSDLARPNAGRSGRDTSSTEVGSGPSDSGPTPPPTGPGTAPLTEPLPETPEAASGAAAAAASSCGSAASQILLSIKPASRAINEPSNVRAKQNIIYAAKHEGDMSLRVSTAAEHNSSSLKQNPAAAVAQDHAKKFIAVPARLQTRCGAIRAKELVDYSSGASSAVSELDDADKEVRNLTSRAFRSLAYPYFEALNISSRESSTTLSEVGFGRWSTFLDLKCGGVGARVEQSLLRSSAASVAAGLRKGSGARATADQLYIQSKKSQTKALEFVVSKVEGEIKHVETPLCFQKQVQTGSRVVTLLEPLNVRSESKASSAPGPGRATKGPGKGPGSAYTDDGSETSEGSKPTSRADGPQKSKFASSLLKNVISKKMQREHEFKMERGEVMDTSHHLSGTSKETEGARGSERQRERGLQRQSSRHSEAGSEYTVVSMSDAGGEGSVAGSKSPVFKASTPRERNAGPGRNFTDGHTEVCEIKKSASETVKGIFLRSQNSAFRSWKEKEAEKREEQAPIGKLKLPKGGDWRADLGEISASKNTIMSRLFVPNIQQTPKDKQPRKQATKYPAAQATSTAVIRPKAPEIKIRLGSVQQPSSDFNIAKLLTPKLAGGSASNLFKTIEDNSRAQQKLFRGDNLEKVPHFQVRDIRDKSKAQGPLHQVRDVRKLIKGSGDSSDKGSVTPEQGLTGPKPRQLSAAAGGSGSLSPMVITCQAVVNQREDSMDREPRESMGKGGGSRVLNSSSPEGTVLVHRASGRLPVATIAPNKPEQGSYLPVLKIVSKASTQKTPEKLKEEEVKEEGKATKPARNALEKLTAAVRSMEELYSFNRNEWKRKSDPLPMMMDSHVLSLIASEEREGVVVADGDHDKLSKRLGEVEERGTGNKAGVVLRGAPIERLQRRNSNPSAESVSARAAAFENLARERPRSLYIPPVHKDVERTQPLQPLPPLPSNRNVFTVSASSIQKTGGVAGKFPQGPSPESPSAAKGIKSQGLRSLKISPATRAPPDEVTNRKSGSNLEKSNSDCENYLTIPLKGSSAAGELLSRPGASREGPPNSSAATLCSLPPLSARSQVPSSSKGSQVSGTSRPAWRTKPDNPRETVAAPPGPQSPEHPPTTIYHQPPLPFTLQGAQPQVLCFSPPSMPAPAPAASAPVPTDPFQQAQPQQTQRKMLLDVTTGQYYLVDTPVQPMTRRLFDPETGQYVDVPMTSQQQAVAPMSISVPPLALSPGAYGPTYMIYPGFLPTVLPTNALQPTPIARAPRGSELSPMVAEPSSKEAAATFTEAPYFMASGQSPASSTSSAPAATSQLLGAKAFAQLHGKPVISITSQPLGPRIIAPPSFDGTTMSFVVEHR

SEQ ID NO: 720 - protein, 1873 aa, Homo sapiens
MRTGWATPRRPAGLLMLLFWFFDLAEPSGRAANDPFTIVHGNTGKCIKPVYGWIVADDCDETEDKLWKWVSQHRLFHLHSQKCLGLDITKSVNELRMFSCDSSAMLWWKCEHHSLYGAARYRLALKDGHGTAISNASDVWKKGGSEESLCDQPYHEIYTRDGNSYGRPCEFPFLIDGTWHHDCILDEDHSGPWCATTLNYEYDRKWGICLKPENGCEDNWEKNEQFGSCYQFNTQTALSWKEAYVSCQNQGADLLSINSAAELTYLKEKEGIAKIFWIGLNQLYSARGWEWSDHKPLNFLNWDPDRPSAPTIGGSSCARMDAESGLWQSFSCEAQLPYVCRKPLNNTVELTDVWTYSDTRCDAGWLPNNGFCYLLVNESNSWDKAHAKCKAFSSDLISIHSLADVEVVVTKLHNEDIKEEVWIGLKNINIPTLFQWSDGTEVTLTYWDENEPNVPYNKTPNCVSYLGELGQWKVQSCEEKLKYVCKRKGEKLNDASSDKMCPPDEGWKRHGETCYKIYEDEVPFGTNCNLTITSRFEQEYLNDLMKKYDKSLRKYFWTGLRDVDSCGEYNWATVGGRRRAVTFSNWNFLEPASPGGCVAMSTGKSVGKWEVKDCRSFKALSICKKMSGPLGPEEASPKPDDPCPEGWQSFPASLSCYKVFHAERIVRKRNWEEAERFCQALGAHLSSFSHVDEIKEFLHFLTDQFSGQHWLWIGLNKRSPDLQGSWQWSDRTPVSTIIMPNEFQQDYDIRDCAAVKVFHRPWRRGWHFYDDREFIYLRPFACDTKLEWVCQIPKGRTPKTPDWYNPDRAGIHGPPLIIEGSEYWFVADLHLNYEEAVLYCASNHSFLATITSFVGLKAIKNKIANISGDGQKWWIRISEWPIDDHFTYSRYPWHRFPVTFGEECLYMSAKTWLIDLGKPTDCSTKLPFICEKYNVSSLEKYSPDSAAKVQCSEQWIPFQNKCFLKIKPVSLTFSQASDTCHSYGGTLPSVLSQIEQDFITSLLPDMEATLWIGLRWTAYEKINKWTDNRELTYSNFHPLLVSGRLRIPENFFEEESRYHCALILNLQKSPFTGTWNFTSCSERHFVSLCQKYSEVKSRQTLQNASETVKYLNNLYKIIPKTLTWHSAKRECLKSNMQLVSITDPYQQAFLSVQALLHNSSLWIGLFSQDDELNFGWSDGKRLHFSRWAETNGQLEDCVVLDTDGFWKTVDCNDNQPGAICYYSGNETEKEVKPVDSVKCPSPVLNTPWIPFQNCCYNFIITKNRHMATTQDEVHTKCQKLNPKSHILSIRDEKENNFVLEQLLYFNYMASWVMLGITYRNKSLMWFDKTPLSYTHWRAGRPTIKNEKFLAGLSTDGFWDIQTFKVIEEAVYFHQHSILACKIEMVDYKEEYNTTLPQFMPYEDGIYSVIQKKVTWYEALNMCSQSGGHLASVHNQNGQLFLEDIVKRDGFPLWVGLSSHDGSESSFEWSDGSTFDYIPWKGQTSPGNCVLLDPKGTWKHEKCNSVKDGAICYKPTKSKKLSRLTYSSRCPAAKENGSRWIQYKGHCYKSDQALHSFSEAKKLCSKHDHSATIVSIKDEDENKFVSRLMRENNNITMRVWLGLSQHSVDQSWSWLDGSEVTFVKWENKSKSGVGRCSMLIASNETWKKVECEHGFGRVVCKVPLDCPSSTWIQFQDSCYIFLQEAIKVESIEDVRNQCTDHGADMISIHNEEENAFILDTLKKQWKGPDDILLGMFYDTDDASFKWFDNSNMTFDKWTDQDDDEDLVDTCAFLHIKTGEWKKGNCEVSSVEGTLCKTAIPYKRKYLSDNHILISALVIASTVILTVLGAIIWFLYKKHSDSRFTTVFSTAPQSPYNEDCVLVVGEENEYPVQFD

SEQ ID NO: 721 - protein, 1471 aa, Homo sapiens
MEPRMESCLAQVLQKDVGKRLQVGQELIDYFSDKQKSADLEHDQTMLDKLVDGLATSWVNSSNYKVVLLGMDILSALVTRLQDRFKAQIGTVLPSLIDRLGDAKDSVREQDQTLLLKIMDQAANPQYVWDRMLGGFKHKNFRTREGICLCLIATLNASGAQTLTLSKIVPHICNLLGDPNSQVRDAAINSLVEIYRHVGERVRADLSKKGLPQSRLNVIFTKFDEVQKSGNMIQSANDKNFDDEDSVDGNRPSSASSTSSKAPPSSRRNVGMGTTRRLGSSTLGSKSSAAKEGAGAVDEEDFIKAFDDVPVVQIYSSRDLEESINKIREILSDDKHDWEQRVNALKKIRSLLLAGAAEYDNFFQHLRLLDGAFKLSAKDLRSQVVREACITLGHLSSVLGNKFDHGAEAIMPTIFNLIPNSAKIMATSGVVAVRLIIRHTHIPRLIPVITSNCTSKSVAVRRRCFEFLDLLLQEWQTHSLERHISVLAETIKKGIHDADSEARIEARKCYWGFHSHFSREAEHLYHTLESSYQKALQSHLKNSDSIVSLPQSDRSSSSSQESLNRPLSAKRSPTGSTTSRASTVSTKSVSTTGSLQRSRSDIDVNAAASAKSKVSSSSGTTPFSSAAALPPGSYASLGRIRTRRQSSGSATNVASTPDNRGRSRAKVVSQSQRSRSANPAGAGSRSSSPGKLLGSGYGGLTGGSSRGPPVTPSSEKRSKIPRSQGCSRETSPNRIGLDRFGLGQPGRIPGSVNAMRVLSTSTDLEAAVADALLLGDSRSKKKPVRRRYEPYGMYSDDDANSDASSVCSERSYGSRNGGIPHYLRQTEDVAEVLNHCASSNWSERKEGLLGLQNLLKSQRTLSRVELKRLCEIFTRMFADPHSKRVFSMFLETLVDFIIIHKDDLQDWLFVLLTQLLKKMGADLLGSVQAKVQKALDVTRDSFPFDQQFNILMRFIVDQTQTPNLKVKVAILKYIESLARQMDPTDFVNSSETRLAVSRIITWTTEPKSSDVRKAAQIVLISLFELNTPEFTMLLGALPKTFQDGATKLLHNHLKNSSNTSVGSPSNTIGRTPSRHTSSRTSPLTSPTNCSHGGLSPSMLDYDTENLNSEEIYSSLRGVTEAIEKFSFRSQEDLNEPIKRDGKKECDIVSRDGGAASPATEGRGGSEVEGGRTALDNKTSLLNTQPPRAFPGPRARDYNPYPYSDAINTYDKTALKEAVFDDDMEQLRDVPIDHSDLVADLLKELSNHNERVEERKGALLELLKITREDSLGVWEEHFKTILLLLLETLGDKDHSIRALALRVLREILRNQPARFKNYAELTIMKTLEAHKDSHKEVVRAAEEAASTLASSIHPEQCIKVLCPIIQTADYPINLAAIKMQTKVVERIAKESLLQLLVDIIPGLLQGYDNTESSVRKASVFCLVAIYSVIGEDLKPHLAQLTGSKMKLLNLYIKRAQTTNSNSSSSSDVSTHS

SEQ ID NO: 722 - protein, 2355 aa, Homo sapiens
MLRGPGPGLLLLAVQCLGTAVPSTGASKSKRQAQQMVQPQSPVAVSQSKPGCYDNGKHYQINQQWERTYLGNALVCTCYGGSRGFNCESKPEAEETCFDKYTGNTYRVGDTYERPKDSMIWDCTCIGAGRGRISCTIANRCHEGGQSYKIGDTWRRPHETGGYMLECVCLGNGKGEWTCKPIAEKCFDHAAGTSYVVGETWEKPYQGWMMVDCTCLGEGSGRITCTSRNRCNDQDTRTSYRIGDTWSKKDNRGNLLQCICTGNGRGEWKCERHTSVQTTSSGSGPFTDVRAAVYQPQPHPQPPPYGHCVTDSGVVYSVGMQWLKTQGNKQMLCTCLGNGVSCQETAVTQTYGGNSNGEPCVLPFTYNGRTFYSCTTEGRQDGHLWCSTTSNYEQDQKYSFCTDHTVLVQTRGGNSNGALCHFPFLYNNHNYTDCTSEGRRDNMKWCGTTQNYDADQKFGFCPMAAHEEICTTNEGVMYRIGDQWDKQHDMGHMMRCTCVGNGRGEWTCIAYSQLRDQCIVDDITYNVNDTFHKRHEEGHMLNCTCFGQGRGRWKCDPVDQCQDSETGTFYQIGDSWEKYVHGVRYQCYCYGRGIGEWHCQPLQTYPSSSGPVEVFITETPSQPNSHPIQWNAPQPSHISKYILRWRPKNSVGRWKEATIPGHLNSYTIKGLKPGVVYEGQLISIQQYGHQEVTRFDFTTTSTSTPVTSNTVTGETTPFSPLVATSESVTEITASSFVVSWVSASDTVSGFRVEYELSEEGDEPQYLDLPSTATSVNIPDLLPGRKYIVNVYQISEDGEQSLILSTSQTTAPDAPPDPTVDQVDDTSIVVRWSRPQAPITGYRIVYSPSVEGSSTELNLPETANSVTLSDLQPGVQYNITIYAVEENQESTPVVIQQETTGTPRSDTVPSPRDLQFVEVTDVKVTIMWTPPESAVTGYRVDVIPVNLPGEHGQRLPISRNTFAEVTGLSPGVTYYFKVFAVSHGRESKPLTAQQTTKLDAPTNLQFVNETDSTVLVRWTPPRAQITGYRLTVGLTRRGQPRQYNVGPSVSKYPLRNLQPASEYTVSLVAIKGNQESPKATGVFTTLQPGSSIPPYNTEVTETTIVITWTPAPRIGFKLGVRPSQGGEAPREVTSDSGSIVVSGLTPGVEYVYTIQVLRDGQERDAPIVNKVVTPLSPPTNLHLEANPDTGVLTVSWERSTTPDITGYRITTTPTNGQQGNSLEEVVHADQSSCTFDNLSPGLEYNVSVYTVKDDKESVPISDTIIPAVPPPTDLRFTNIGPDTMRVTWAPPPSIDLTNFLVRYSPVKNEEDVAELSISPSDNAVVLTNLLPGTEYVVSVSSVYEQHESTPLRGRQKTGLDSPTGIDFSDITANSFTVHWIAPRATITGYRIRHHPEHFSGRPREDRVPHSRNSITLTNLTPGTEYVVSIVALNGREESPLLIGQQSTVSDVPRDLEVVAATPTSLLISWDAPAVTVRYYRITYGETGGNSPVQEFTVPGSKSTATISGLKPGVDYTITVYAVTGRGDSPASSKPISINYRTEIDKPSQMQVTDVQDNSISVKWLPSSSPVTGYRVTTTPKNGPGPTKTKTAGPDQTEMTIEGLQPTVEYVVSVYAQNPSGESQPLVQTAVTNIDRPKGLAFTDVDVDSIKIAWESPQGQVSRYRVTYSSPEDGIHELFPAPDGEEDTAELQGLRPGSEYTVSVVALHDDMESQPLIGTQSTAIPAPTDLKFTQVTPTSLSAQWTPPNVQLTGYRVRVTPKEKTGPMKEINLAPDSSSVVVSGLMVATKYEVSVYALKDTLTSRPAQGVVTTLENVSPPRRARVTDATETTITISWRTKTETITGFQVDAVPANGQTPIQRTIKPDVRSYTITGLQPGTDYKIYLYTLNDNARSSPVVIDASTAIDAPSNLRFLATTPNSLLVSWQPPRARITGYIIKYEKPGSPPREVVPRPRPGVTEATITGLEPGTEYTIYVIALKNNQKSEPLIGRKKTDELPQLVTLPHPNLHGPEILDVPSTVQKTPFVTHPGYDTGNGIQLPGTSGQQPSVGQQMIFEEHGFRRTTPPTTATPIRHRPRPYPPNVGQEALSQTTISWAPFQDTSEYIISCHPVGTDEEPLQFRVPGTSTSATLTGLTRGATYNIIVEALKDQQRHKVREEVVTVGNSVNEGLNQPTDDSCFDPYTVSHYAVGDEWERMSESGFKLLCQCLGFGSGHFRCDSSRWCHDNGVNYKIGEKWDRQGENGQMMSCTCLGNGKGEFKCDPHEATCYDDGKTYHVGEQWQKEYLGAICSCTCFGGQRGWRCDNCRRPGGEPSPEGTTGQSYNQYSQRYHQRTNTNVNCPIECFMPLDVQADREDSRE

SEQ ID NO: 723 - protein, 1538 aa, Homo sapiens
MEPRMESCLAQVLQKDVGKRLQVGQELIDYFSDKQKSADLEHDQTMLDKLVDGLATSWVNSSNYKVVLLGMDILSALVTRLQDRFKAQIGTVLPSLIDRLGDAKDSVREQDQTLLLKIMDQAANPQYVWDRMLGGFKHKNFRTREGICLCLIATLNASGAQTLTLSKIVPHICNLLGDPNSQVRDAAINSLVEIYRHVGERVRADLSKKGLPQSRLNVIFTKFDEVQKSGNMIQSANDKNFDDEDSVDGNRPSSASSTSSKAPPSSRRNVGMGTTRRLGSSTLGSKSSAAKEGAGAVDEEDFIKAFDDVPVVQIYSSRDLEESINKIREILSDDKHDWEQRVNALKKIRSLLLAGAAEYDNFFQHLRLLDGAFKLSAKDLRSQVVREACITLGHLSSVLGNKFDHGAEAIMPTIFNLIPNSAKIMATSGVVAVRLIIRHTHIPRLIPVITSNCTSKSVAVRRRCFEFLDLLLQEWQTHSLERHISVLAETIKKGIHDADSEARIEARKCYWGFHSHFSREAEHLYHTLESSYQKALQSHLKNSDSIVSLPQSDRSSSSSQESLNRPLSAKRSPTGSTTSRASTVSTKSVSTTGSLQRSRSDIDVNAAASAKSKVSSSSGTTPFSSAAALPPGSYASLGRIRTRRQSSGSATNVASTPDNRGRSRAKVVSQSQRSRSANPAGAGSRSSSPGKLLGSGYGGLTGGSSRGPPVTPSSEKRSKIPRSQGCSRETSPNRIGLARSSRIPRPSMSQGCSRDTSRESSRDTSPARGFPPLDRFGLGQPGRIPGSVNAMRVLSTSTDLEAAVADALKKPVRRRYEPYGMYSDDDANSDASSVCSERSYGSRNGGIPHYLRQTEDVAEVLNHCASSNWSERKEGLLGLQNLLKSQRTLSRVELKRLCEIFTRMFADPHSKRVFSMFLETLVDFIIIHKDDLQDWLFVLLTQLLKKMGADLLGSVQAKVQKALDVTRDSFPFDQQFNILMRFIVDQTQTPNLKVKVAILKYIESLARQMDPTDFVNSSETRLAVSRIITWTTEPKSSDVRKAAQIVLISLFELNTPEFTMLLGALPKTFQDGATKLLHNHLKNSSNTSVGSPSNTIGRTPSRHTSSRTSPLTSPTNCSHGGLSPSRLWGWSADGLAKHPPPFSQPNSIPTAPSHKALRRSYSPSMLDYDTENLNSEEIYSSLRGVTEAIEKFSFRSQEDLNEPIKRDGKKECDIVSRDGGAASPATEGRGGSEVEGGRTALDNKTSLLNTQPPRAFPGPRARDYNPYPYSDAINTYDKTALKEAVFDDDMEQLRDVPIDHSDLVADLLKELSNHNERVEERKGALLELLKITREDSLGVWEEHFKTILLLLLETLGDKDHSIRALALRVLREILRNQPARFKNYAELTIMKTLEAHKDSHKEVVRAAEEAASTLASSIHPEQCIKVLCPIIQTADYPINLAAIKMQTKVVERIAKESLLQLLVDIIPGLLQGYDNTESSVRKASVFCLVAIYSVIGEDLKPHLAQLTGSKMKLLNLYIKRAQTTNSNSSSSSDVSTHS

SEQ ID NO: 724 - protein, 2144 aa, Homo sapiens
MTSLAQQLQRLALPQSDASLLSRDEVASLLFDPKEAATIDRDTAFAIGCTGLEELLGIDPSFEQFEAPLFSQLAKTLERSVQTKAVNKQLDENISLFLIHLSPYFLLKPAQKCLEWLIHRFHIHLYNQDSLIACVLPYHETRIFVRVIQLLKINNSKHRWFWLLPVKQSGVPLAKGTLITHCYKDLGFMDFICSLVTKSVKVFAEYPGSSAQLRVLLAFYASTIVSALVAAEDVSDNIIAKLFPYIQKGLKSSLPDYRAATYMIICQISVKVTMENTFVNSLASQIIKTLTKIPSLIKDGLSCLIVLLQRQKPESLGKKPFPHLCNVPDLITILHGISETYDVSPLLHYMLPHLVVSIIHHVTGEETEGMDGQIYKRHLEAILTKISLKNNLDHLLASLLFEEYISYSSQEEMDSNKVSLLNEQFLPLIRLLESKYPRTLDVVLEEHLKEIADLKKQELFHQFVSLSTSGGKYQFLADSDTSLMLSLNHPLAPVRILAMNHLKKIMKTSKEGVDESFIKEAVLARLGDDNIDVVLSAISAFEIFKEHFSSEVTISNLLNLFQRAELSKNGEWYEVLKIAADILIKEEILSENDQLSNQVVVCLLPFMVINNDDTESAEMKIAIYLSKSGICSLHPLLRGWEEALENVIKSTKPGKLIGVANQKMIELLADNINLGDPSSMLKMVEDLISVGEEESFNLKQKVTFHVILSVLVSCCSSLKETHFPFAIRVFSLLQKKIKKLESVITAVEIPSEWHIELMLDRGIPVELWAHYVEELNSTQRVAVEDSVFLVFSLKKFIYALKAPKSFPKGDIWWNPEQLKEDSRDYLHLLIGLFEMMLNGADAVHFRVLMKLFIKVHLEDVFQLFKFCSVLWTYGSSLSNPLNCSVKTVLQTQALYVGCAMLSSQKTQCKHQLASISSPVVTSLLINLGSPVKEVRRAAIQCLQALSGVASPFYLIIDHLISKAEEITSDAAYVIQDLATLFEELQREKKLKSHQKLSETLKNLLSCVYSCPSYIAKDLMKVLQGVNGEMVLSQLLPMAEQLLEKIQKEPTAVLKDEAMVLHLTLGKYNEFSVSLLNEDPKSLDIFIKAVHTTKELYAGMPTIQITALEKITKPFFAAISDEKVQQKLLRMLFDLLVNCKNSHCAQTVSSVFKGISVNAEQVRIELEPPDKAKPLGTVQQKRRQKMQQKKSQDLESVQEVGGSYWQRVTLILELLQHKKKLRSPQILVPTLFNLLSRCLEPLPQEQGNMEYTKQLILSCLLNICQKLSPDGGKIPKDILDEEKFNVELIVQCIRLSEMPQTHHHALLLLGTVAGIFPDKVLHNIMSIFTFMGANVMRLDDTYSFQVINKTVKMVIPALIQSDSGDSIEVSRNVEEIVVKIISVFVDALPHVPEHRRLPILVQLVDTLGAEKFLWILLILLFEQYVTKTVLAAAYGEKDAILEADTEFWFSVCCEFSVQHQIQSLMNILQYLLKLPEEKEETIPKAVSFNKSESQEEMLQVFNVETHTSKQLRHFKFLSVSFMSQLLSSNNFLKKVVESGGPEILKGLEERLLETVLGYISAVAQSMERNADKLTVKFWRALLSKAYDLLDKVNALLPTETFIPVIRGLVGNPLPSVRRKALDLLNNKLQQNISWKKTIVTRFLKLVPDLLAIVQRKKKEGEEEQAINRQTALYTLKLLCKNFGAENPDPFVPVLNTAVKLIAPERKEEKNVLGSALLCIAEVTSTLEALAIPQLPSLMPSLLTTMKNTSELVSSEVYLLSALAALQKVVETLPHFISPYLEGILSQVIHLEKITSEMGSASQANIRLTSLKKTLATTLAPRVLLPAIKKTYKQIEKNWKNHMGPFMSILQEHIGVMKKEELTSHQSQLTAFFLEALDFRAQHSENDLEEVGKTENCIIDCLVAMVVKLSEVTFRPLFFKLFDWAKTEDAPKDRLLTFYNLADCIAEKLKGLFTLFAGHLVKPFADTLNQVNISKTDEAFFDSENDPEKCCLLLQFILNCLYKIFLFDTQHFISKERAEALMMPLVDQLENRLGGEEKFQERVTKHLIPCIAQFSVAMADDSLWKPLNYQILLKTRDSSPKVRFAALITVLALAEKLKENYIVLLPESIPFLAELMEDECEEVEHQCQKTIQQLETVLGEPLQSYF

SEQ ID NO: 725 - protein, 434 aa, Homo sapiens
MSIEKIWAREILDSRGNPTVEVDLYTAKGLFRAAVPSGASTGIYEALELRDGDKQRYLGKGVLKAVDHINSTIAPALISSGLSVVEQEKLDNLMLELDGTENKSKFGANAILGVSLAVCKAGAAERELPLYRHIAQLAGNSDLILPVPAFNVINGGSHAGNKLAMQEFMILPVGAESFRDAMRLGAEVYHTLKGVIKDKYGKDATNVGDEGGFAPNILENSEALELVKEAIDKAGYTEKIVIGMDVAASEFYRDGKYDLDFKSPTDPSRYITGDQLGALYQDFVRDYPVVSIEDPFDQDDWAAWSKFTANVGIQIVGDDLTVTNPKRIERAVEEKACNCLLLKVNQIGSVTEAIQACKLAQENGWGVMVSHRSGETEDTFIADLVVGLCTGQIKTGAPCRSERLAKYNQLMRIEEELGDEARFAGHNFRNPSVL

SEQ ID NO: 726 - protein, 461 aa, Homo sapiens
MGHLSAPLHRVRVPWQGLLLTASLLTFWNPPTTAQLTTESMPFNVAEGKEVLLLVHNLPQQLFGYSWYKGERVDGNRQIVGYAIGTQQATPGPANSGRETIYPNASLLIQNVTQNDTGFYTLQVIKSDLVNEEATGQFHVYPELPKPSISSNNSNPVEDKDAVAFTCEPETQDTTYLWWINNQSLPVSPRLQLSNGNRTLTLLSVTRNDTGPYECEIQNPVSANRSDPVTLNVTYGPDTPTISPSDTYYRPGANLSLSCYAASNPPAQYSWLINGTFQQSTQELFIPNITVNNSGSYTCHANNSVTGCNRTTVKTIIVTERQNLTMLPRLDSNSWAQAILPSVSQSAEITDNALPQENGLSPGAIAGIVIGVVALVALIAVALACFLHFGKTGRASDQRDLTEHKPSVSNHTQDHSNDPPNKMNEVTYSTLNFEAQQPTQPTSASPSLTATEIIYSEVKKQ

SEQ ID NO: 727 - protein, 2302 aa, Homo sapiens
MTSEEMTASVLIPVTQRKVVSAQSAADESSEKVSDINISKAHTVRRSGETSHTISQLNKLKEEPSGSNLPKILSIAREKIVSDENSNEKCWEKIMPDSAKNLNINCNNILRNHQHGLPQRQFYEMYNSVAEEDLCLETGIPSPLERKVFPGIQLELDRPSMGISPLGNQSVIIETGRAHPDSRRAVFHFHYEVDRRMSDTFCTLSENLILDDCGNCVPLPGGEEKQKKNYVAYTCKLMELAKNCDNKNEQLQCDHCDTLNDKYFCFEGSCEKVDMVYSGDSFCRKDFTDSQAAKTFLSHFEDFPDNCDDVEEDAFKSKKERSTLLVRRFCKNDREVKKSVYTGTRAIVRTLPSGHIGLTAWSYIDQKRNGPLLPCGRVMEPPSTVEIRQDGSQRLSEAQWYPIYNAVRREETENTVGSLLHFLTKLPASETAHGRISVGPCLKQCVRDTVCEYRATLQRTSISQYITGSLLEATTSLGARSGLLSTFGGSTGRMMLKERQPGPSVANSNALPSSSAGISKELIDLQPLIQFPEEVASILMEQEQTIYRRVLPVDYLCFLTRDLGTPECQSSLPCLKASISASILTTQNGEHNALEDLVMRFNEVSSWVTWLILTAGSMEEKREVFSYLVHVAKCCWNMGNYNAVMEFLAGLRSRKVLKMWQFMDQSDIETMRSLKDAMAQHESSCEYRKVVTRALHIPGCKVVPFCGVFLKELCEVLDGASGLMKLCPRYNSQEETLEFVADYSGQDNFLQRVGQNGLKNSEKESTVNSIFQVIRSCNRSLETDEEDSPSEGNSSRKSSLKDKSRWQFIIGDLLDSDNDIFEQSKEYDSHGSEDSQKAFDHGTELIPWYVLSIQADVHQFLLQGATVIHYDQDTHLSARCFLQLQPDNSTLTWVKPTTASPASSKAKLGVLNNTAEPGKFPLLGNAGLSSLTEGVLDLFAVKAVYMGHPGIDIHTVCVQNKLGSMFLSETGVTLLYGLQTTDNRLLHFVAPKHTAKMLFSGLLELTRAVRKMRKFPDQRQQWLRKQYVSLYQEDGRYEGPTLAHAVELFGGRRWSARNPSPGTSAKNAEKPNMQRNNTLGISTTKKKKKILMRGESGEVTDDEMATRKAKMHKECRSRSGSDPQDINEQEESEVNAIANPPNPLPSRRAHSLTTAGSPNLAAGTSSPIRPVSSPVLSSSNKSPSSAWSSSSWHGRIKGGMKGFQSFMVSDSNMSFVEFVELFKSFSVRSRKDLKDLFDVYAVPCNRSGSESAPLYTNLTIDENTSDLQPDLDLLTRNVSDLGLFIKSKQQLSDNQRQISDAIAAASIVTNGTGIESTSLGIFGVGILQLNDFLVNCQGEHCTYDEILSIIQKFEPSISMCHQGLMSFEGFARFLMDKENFASKNDESQENIKELQLPLSYYYIESSHNTYLTGHQLKGESSVELYSQVLLQGCRSVELDCWDGDDGMPIIYHGHTLTTKIPFKEVVEAIDRSAFINSDLPIIISIENHCSLPQQRKMAEIFKTVFGEKLVTKFLFETDFSDDPMLPSPDQLRKKVLLKNKKLKAHQTPVDILKQKAHQLASMQVQAYNGGNANPRPANNEEEEDEEDEYDYDYESLSDDNILEDRPENKSCNDKLQFEYNEEIPKRIKKADNSACNKGKVYDMELGEEFYLDQNKKESRQIAPELSDLVIYCQAVKFPGLSTLNASGSSRGKERKSRKSIFGNNPGRMSPGETASFNKTSGKSSCEGIRQTWEESSSPLNPTTSLSAIIRTPKCYHISSLNENAAKRLCRRYSQKLTQHTACQLLRTYPAATRIDSSNPNPLMFWLHGIQLVALNYQTDDLPLHLNAAMFEANGGCGYVLKPPVLWDKNCPMYQKFSPLERDLDSMDPAVYSLTIVSGQNVCPSNSMGSPCIEVDVLGMPLDSCHFRTKPIHRNTLNPMWNEQFLFHVHFEDLVFLRFAVVENNSSAVTAQRIIPLKALKRGYRHLQLRNLHNEVLEISSLFINSRRMEENSSGNTMSASSMFNTEERKCLQTHRVTVHGVPGPEPFTVFTINGGTKAKQLLQQILTNEQDIKPVTTDYFLMEEKYFISKEKNECRKQPFQRAIGPEEEIMQILSSWFPEEGYMGRIVLKTQQENLEEKNIVQDDKEVILSSEEESFFVQVHDVSPEQPRTVIKAPRVSTAQDVIQQTLCKAKYSYSILSNPNPSDYVLLEEVVKDTTNKKTTTPKSSQRVLLDQECVFQAQSKWKGAGKFILKLKEQVQASREDKKKGISFASELKKLTKSTKQPRGLTSPSQLLTSESIQTKEEKPVGGLSSSDTMDYRQ

SEQ ID NO: 728 - protein, 1796 aa, Homo sapiens
MENEIFTPLLEQFMTSPLVTWVKTFGPLAAGNGTNLDEYVALVDGVFLNQVMLQINPKLESQRVNKKVNNDASLRMHNLSILVRQIKFYYQETLQQLIMMSLPNVLIIGKNPFSEQGTEEVKKLLLLLLGCAVQCQKKEEFIERIQGLDFDTKAAVAAHIQEVTHNQENVFDLQWMEVTDMSQEDIEPLLKNMALHLKRLIDERDEHSETIIELSEERDGLHFLPHASSSAQSPCGSPGMKRTESRQHLSVELADAKAKIRRLRQELEEKTEQLLDCKQELEQMEIELKRLQQENMNLLSDARSARMYRDELDALREKAVRVDKLESEVSRYKERLHDIEFYKARVEELKEDNQVLLETKTMLEDQLEGTRARSDKLHELEKENLQLKAKLHDMEMERDMDRKKIEELMEENMTLEMAQKQSMDESLHLGWELEQISRTSELSEAPQKSLGHEVNELTSSRLLKLEMENQSLTKTVEELRTTVDSVEGNASKILKMEKENQRLSKKVEILENEIVQEKQSLQNCQNLSKDLMKEKAQLEKTIETLRENSERQIKILEQENEHLNQTVSSLRQRSQISAEARVKDIEKENKILHESIKETSSKLSKIEFEKRQIKKELEHYKEKGERAEELENELHHLEKENELLQKKITNLKITCEKIEALEQENSELERENRKLKKTLDSFKNLTFQLESLEKENSQLDEENLELRRNVESLKCASMKMAQLQLENKELESEKEQLKKGLELLKASFKKTERLEVSYQGLDIENQRLQKTLENSNKKIQQLESELQDLEMENQTLQKNLEELKISSKRLEQLEKENKSLEQETSQLEKDKKQLEKENKRLRQQAEIKDTTLEENNVKIGNLEKENKTLSKEIGIYKESCVRLKELEKENKELVKRATIDIKTLVTLREDLVSEKLKTQQMNNDLEKLTHELEKIGLNKERLLHDEQSTDDRYKLLESKLESTLKKSLEIKEEKIAALEARLEESTNYNQQLRQELKTVKKNYEALKQRQDEERMVQSSPPISGEDNKWERESQETTRELLKVKDRLIEVERNNATLQAEKQALKTQLKQLETQNNNLQAQILALQRQTVSLQEQNTTLQTQNAKLQVENSTLNSQSTSLMNQNAQLLIQQSSLENENESVIKEREDLKSLYDSLIKDHEKLELLHERQASEYESLISKHGTLKSAHKNLEVEHRDLEDRYNQLLKQKGQLEDLEKMLKVEQEKMLLENKNHETVAAEYKKLCGENDRLNHTYSQLLKETEVLQTDHKNLKSLLNNSKLEQTRLEAEFSKLKEQYQQLDITSTKLNNQCELLSQLKGNLEEENRHLLDQIQTLMLQNRTLLEQNMESKDLFHVEQRQYIDKLNELRRQKEKLEEKIMDQYKFYDPSPPRRRGNWITLKMRKLIKSKKDINRERQKSLTLTPTRSDSSEGFLQLPHQDSQDSSSVGSNSLEDGQTLGTKKSSMVALKRLPFLRNRPKDKDKMKACYRRSMSMNDLVQSMVLAGQWTGSTENLEVPDDISTGKRRKELGAMAFSTTAINFSTVNSSAGFRSKQLVNNKDTTSFEDISPQGVSDDSSTGSRVHASRPASLDSGRTSTSNSNNNASLHEVKAGAVNNQSRPQSHSSGEFSLLHDHEAWSSSGSSPIQYLKRQTRSSPVLQHKISETLESRHHKIKTGSPGSEVVTLQQFLEESNKLTSVQIKSSSQENLLDEVMKSLSVSSDFLGKDKPVSCGLASVISTAEGTTRRTSIHDFLTKDSRLPISVDSPPAAADSNTTAASNVDKVQESRNSKSRSREQQSS

SEQ ID NO: 729 - protein, 252 aa, Homo sapiens
MGPPSASPHRECIPWQGLLLTASLLNFWNPPTTAKLTIESMPLSVAEGKEVLLLVHNLPQHLFGYSWYKGERVDGNSLIVGYVIGTQQATPGAAYSGRETIYTNASLLIQNVTQNDIGFYTLQVIKSDLVNEEATGQFHVYQENAPGLPVGAVAGIVTGVLVGVALVAALVCFLLLAKTGRTSIQRDLKEQQPQALAPGRGPSHSSAFSMSPLSTAQAPLPNPRTAASIYEELLKHDTNIYCRMDHKAEVAS

SEQ ID NO: 730 - protein, 129 aa, Homo sapiens
MEAPAQLLFLLLLWLPDTTGEIVMTQSPATLSVSPGERATLSCRASQSVSNNLAWYQQKPGQPPRLLIYGASTRATGIPARFSGSGSGTEFTLTISRLQSEDFAVYYCQQYNNWPPWTFGQGTRVEIKR

SEQ ID NO: 731 - protein, 1192 aa, Homo sapiens
MSRGAGALQRRTTTYLISLTLVKLESVPPPPPSPSAAAAGAAGARGSETGDPGSPRGAEEPGKKRHERLFHRQDALWISTSSAGTGGAEPPALSPAPASPARPVSPAPGRRLSLWAVPPGPPLSGGLSPDPKPGGAPTSSRRPLLSSPSWGGPEPEGRAGGGIPGSSSPHPGTGSRRLKVAPPPPAPKPCKTVTTSGAKAGGGKGAGSRLSWPESEGKPRVKGSKSSAGTGASVSAAATAAAAGGGGSTASTSGGVGAGAGARGKLSPRKGKSKTLDNSDLHPGPPAGSPPPLTLPPTPSPATAVTAASAQPPGPAPPITLEPPAPGLKRGREGGRASTRDRKMLKFISGIFTKSTGGPPGSGPLPGPPSLSSGSGSRELLGAELRASPKAVINSQEWTLSRSIPELRLGVLGDARSGKSSLIHRFLTGSYQVLEKTESEQYKKEMLVDGQTHLVLIREEAGAPDAKFSGWADAVIFVFSLEDENSFQAVSRLHGQLSSLRGEGRGGLALALVGTQDRISASSPRVVGDARARALCADMKRCSYYETCATYGLNVDRVFQEVAQKVVTLRKQQQLLAACKSLPSSPSHSAASTPVAGQASNGGHTSDYSSSLPSSPNVGHRELRAEAAAVAGLSTPGSLHRAAKRRTSLFANRRGSDSEKRSLDSRGETTGSGRAIPIKQSFLLKRSGNSLNKEWKKKYVTLSSNGFLLYHPSINDYIHSTHGKEMDLLRTTVKVPGKRPPRAISAFGPSASINGLVKDMSTVQMGEGLEATTPMPSPSPSPSSLQPPPDQTSKHLLKPDRNLARALSTDCTPSGDLSPLSREPPPSPMVKKQRRKKLTTPSKTEGSAGQAEAKRKMWKLKSFGSLRNIYKAEENFEFLIVSSTGQTWHFEAASFEERDAWVQAIESQILASLQCCESSKVKLRTDSQSEAVAIQAIRNAKGNSICVDCGAPNPTWASLNLGALICIECSGIHRNLGTHLSRVRSLDLDDWPRELTLVLTAIGNDTANRVWESDTRGRAKPSRDSSREERESWIRAKYEQLLFLAPLSTSEEPLGRQLWAAVQAQDVATVLLLLAHARHGPLDTSVEDPQLRSPLHLAAELAHVVITQLLLWYGADVAARDAQGRTALFYARQAGSQLCADILLQHGCPGEGGSAATTPSAATTPSITATPSPRRRSSAASVGRADAPVALV

SEQ ID NO: 732 - protein, 1914 aa, Homo sapiens
MGDVKLVASSHISKTSLSVDPSRVDSMPLTEAPAFILPPRNLCIKEGATAKFEGRVRGYPEPQVTWHRNGQPITSGGRFLLDCGIRGTFSLVIHAVHEEDRGKYTCEATNGSGARQVTVELTVEGSFAKQLGQPVVSKTLGDRFSAPAVETRPSIWGECPPKFATKLGRVVVKEGQMGRFSCKITGRPQPQVTWLKGNVPLQPSARVSVSEKNGMQVLEIHGVNQDDVGVYTCLVVNGSGKASMSAELSIQGLDSANRSFVRETKATNSDVRKEVTNVISKESKLDSLEAAAKSKNCSSPQRGGSPPWAANSQPQPPRESKLESCKDSPRTAPQTPVLQKTSSSITLQAARVQPEPRAPGLGVLSPSGEERKRPAPPRPATFPTRQPGLGSQDVVSKAANRRIPMEGQRDSAFPKFESKPQSQEVKENQTVKFRCEVSGIPKPEVAWFLEGTPVRRQEGSIEVYEDAGSHYLCLLKARTRDSGTYSCTASNAQGQLSCSWTLQVERLAVMEVAPSFSSVLKDCAVIEGQDFVLQCSVRGTPVPRITWLLNGQPIQYARSTCEAGVAELHIQDALPEDHGTYTCLAENALGQVSCSAWVTVHEKKSSRKSEYLLPVAPSKPTAPIFLQGLSDLKVMDGSQVTMTVQVSGNPPPEVIWLHNGNEIQESEDFHFEQRGTQHSLCIQEVFPEDTGTYTCEAWNSAGEVRTQAVLTVQEPHDGTQPWFISKPRSVTASLGQSVLISCAIAGDPFPTVHWLRDGKALCKDTGHFEVLQNEDVFTLVLKKVQPWHAGQYEILLKNRVGECSCQVSLMLQNSSARALPRGREPASCEDLCGGGVGADGGGSDRYGSLRPGWPARGQGWLEEEDGEDVRGVLKRRVETRQHTEEAIRQQEVEQLDFRDLLGKKVSTKTLSEDDLKEIPAEQMDFRANLQRQVKPKTVSEEERKVHSPQQVDFRSVLAKKGTSKTPVPEKVPPPKPATPDFRSVLGGKKKLPAENGSSSAETLNAKAVESSKPLSNAQPSGPLKPVGNAKPAETLKPMGNAKPAETLKPMGNAKPDENLKSASKEELKKDVKNDVNCKRGHAGTTDNEKRSESQGTAPAFKQKLQDVHVAEGKKLLLQCQVSSDPPATIIWTLNGKTLKTTKFIILSQEGSLCSVSIEKALPEDRGLYKCVAKNDAGQAECSCQVTVDDAPASENTKAPEMKSRRPKSSLPPVLGTESDATVKKKPAPKTPPKAAMPPQIIQFPEDQKVRAGESVELFGKVTGTQPITCTWMKFRKQIQESEHMKVENSENGSKLTILAARQEHCGCYTLLVENKLGSRQAQVNLTVVDKPDPPAGTPCASDIRSSSLTLSWYGSSYDGGSAVQSYSIEIWDSANKTWKELATCRSTSFNVQDLLPDHEYKFRVRAINVYGTSEPSQESELTTVGEKPEEPKDEVEVSDDDEKEPEVDYRTVTINTEQKVSDFYDIEERLGSGKFGQVFRLVEKKTRKVWAGKFFKAYSAKEKENIRQEISIMNCLHHPKLVQCVDAFEEKANIVMVLEIVSGGELFERIIDEDFELTERECIKYMRQISEGVEYIHKQGIVHLDLKPENIMCVNKTGTRIKLIDFGLARRLENAGSLKVLFGTPEFVAPEVINYEPIGYATDMWSIGVICYILVSGLSPFMGDNDNETLANVTSATWDFDDEAFDEISDDAKDFISNLLKKDMKNRLDCTQCLQHPWLMKDTKNMEAKKLSKDRMKKYMARRKWQKTGNAVRAIGRLSSMAMISGLSGRKSSTGSPTSPLNAEKLESEEDVSQAFLEAVAEEKPHVKPYFSKTIRDLEVVEGSAARFDCKIEGYPDPEVVWFKDDQSIRESRHFQIDYDEDGNCSLIISDVCGDDDAKYTCKAVNSLGEATCTAELIVETMEEGEGEGEEEEE

SEQ ID NO: 733 - protein, 1792 aa, Homo sapiens
MSCVHYKFSSKLNYDTVTFDGLHISLCDLKKQIMGREKLKAADCDLQITNAQTKEEYTDDNALIPKNSSVIVRRIPIGGVKSTSKTYVISRTEPAMATTKAIDDSSASISLAQLTKTANLAEANASEEDKIKAMMSQSGHEYDPINYMKKPLGPPPPSYTCFRCGKPGHYIKNCPTNGDKNFESGPRIKKSTGIPRSFMMEVKDPNMKGAMLTNTGKYAIPTIDAEAYAIGKKEKPPFLPEEPSSSSEEDDPIPDELLCLICKDIMTDAVVIPCCGNSYCDECIRTALLESDEHTCPTCHQNDVSPDALIANKFLRQAVNNFKNETGYTKRLRKQLPPPPPPIPPPRPLIQRNLQPLMRSPISRQQDPLMIPVTSSSTHPAPSISSLTSNQSSLAPPVSGNPSSAPAPVPDITATVSISVHSEKSDGPFRDSDNKILPAAALASEHSKGTSSIAITALMEEKGYQVPVLGTPSLLGQSLLHGQLIPTTGPVRINTARPGGGRPGWEHSNKLGYLVSPPQQIRRGERSCYRSINRGRHHSERSQRTQGPSLPATPVFVPVPPPPLYPPPPHTLPLPPGVPPPQFSPQFPPGQPPPAGYSVPPPGFPPAPANLSTPWVSSGVQTAHSNTIPTTQAPPLSREEFYREQRRLKEEEKKKSKLDEFTNDFAKELMEYKKIQKERRRSFSRSKSPYSGSSYSRSSYTYSKSRSGSTRSRSYSRSFSRSHSRSYSRSPPYPRRGRGKSRNYRSRSRSHGYHRSRSRSPPYRRYHSRSRSPQAFRGQSPNKRNVPQGETEREYFNRYREVPPPYDMKAYYGRSVDFRDPFEKERYREWERKYREWYEKYYKGYAAGAQPRPSANRENFSPERFLPLNIRNSPFTRGRREDYVGGQSHRSRNIGSNYPEKLSARDGHNQKDNTKSKEKESENAPGDGKGNKHKKHRKRRKGEESEGFLNPELLETSRKSREPTGVEENKTDSLFVLPSRDDATPVRDEPMDAESITFKSVSEKDKRERDKPKAKGDKTKRKNDGSAVSKKENIVKPAKGPQEKVDGERERSPRSEPPIKKAKEETPKTDNTKSSSSSQKDEKITGTPRKAHSKSAKEHQETKPVKEEKVKKDYSKDVKSEKLTTKEEKAKKPNEKNKPLDNKGEKRKRKTEEKGVDKDFESSSMKISKLEVTEIVKPSPKRKMEPDTEKMDRTPEKDKISLSAPAKKIKLNRETGKKIGSTENISNTKEPSEKLESTSSKVKQEKVKGKVRRKVTGTEGSSSTLVDYTSTSSTGGSPVRKSEEKTDTKRTVIKTMEEYNNDNTAPAEDVIIMIQVPQSKWDKDDFESEEEDVKSTQPISSVGKPASVIKNVSTKPSNIVKYPEKESEPSEKIQKFTKDVSHEIIQHEVKSSKNSASSEKGKTKDRDYSVLEKENPEKRKNSTQPEKESNLDRLNEQGNFKSLSQSSKEARTSDKHDSTRASSNKDFTPNRDKKTDYDTREYSSSKRRDEKNELTRRKDSPSRNKDSASGQKNKPREERDLPKKGTGDSKKSNSSPSRDRKPHDHKATYDTKRPNEETKSVDKNPCKDREKHVLEARNNKESSGNKLLYILNPPETQVEKEQITGQIDKSTVKPKPQLSHSSRLSSDLTRETDEAAFEPDYNESDSESNVSVKEEESSGNISKDLKDKIVEKAKESLDTAAVVQVGISRNQSHSSPSVSPSRSHSPSGSQTRSHSSSASSAESQDSKKKKKKKEKKKHKKHKKHKKHKKHAGTEVELEKSQKHKHKKKKSKKNKDKEKEKEKDDQKVKSVTV

SEQ ID NO: 734 - protein, 112 aa, Homo sapiens
MEKILILLLVALSVAYAAPGPRGIIINLENGELCMNSAQCKSNCCQHSSALGLARCTSMASENSECSVKTLYGIYYKCPCERGLTCEGDKTIVGSITNTNFGICHDAGRSKQ

SEQ ID NO: 735 - protein, 1174 aa, Homo sapiens
MYDADEDMQYDEDDDEITPDLWQEACWIVISSYFDEKGLVRQQLDSFDEFIQMSVQRIVEDAPPIDLQAEAQHASGEVEEPPRYLLKFEQIYLSKPTHWERDGAPSPMMPNEARLRNLTYSAPLYVDITKTVIKEGEEQLQTQHQKTFIGKIPIMLRSTYCLLNGLTDRDLCELNECPLDPGGYFIINGSEKVLIAQEKMATNTVYVFAKKDSKYAYTGECRSCLENSSRPTSTIWVSMLARGGQGAKKSAIGQRIVATLPYIKQEVPIIIVFRALGFVSDRDILEHIIYDFEDPEMMEMVKPSLDEAFVIQEQNVALNFIGSRGAKPGVTKEKRIKYAKEVLQKEMLPHVGVSDFCETKKAYFLGYMVHRLLLAALGRRELDDRDHYGNKRLDLAGPLLAFLFRGMFKNLLKEVRIYAQKFIDRGKDFNLELAIKTRIISDGLKYSLATGNWGDQKKAHQARAGVSQVLNRLTFASTLSHLRRLNSPIGRDGKLAKPRQLHNTLWGMVCPAETPEGHAVGLVKNLALMAYISVGSQPSPILEFLEEWSMENLEEISPAAIADATKIFVNGCWVGIHKDPEQLMNTLRKLRRQMDIIVSEVSMIRDIREREIRIYTDAGRICRPLLIVEKQKLLLKKRHIDQLKEREYNNYSWQDLVASGVVEYIDTLEEETVMLAMTPDDLQEKEVAYCSTYTHCEIHPSMILGVCASIIPFPDHNQSPRNTYQSAMGKQAMGVYITNFHVRMDTLAHVLYYPQKPLVTTRSMEYLRFRELPAGINSIVAIASYTGYNQEDSVIMNRSAVDRGFFRSVFYRSYKEQESKKGFDQEEVFEKPTRETCQGMRHAIYDKLDDDGLIAPGVRVSGDDVIIGKTVTLPENEDELESTNRRYTKRDCSTFLRTSETGIVDQVMVTLNQEGYKFCKIRVRSVRIPQIGDKFASRHGQKGTCGIQYRQEDMPFTCEGITPDIIINPHAIPSRMTIGHLIECLQGKVSANKGEIGDATPFNDAVNVQKISNLLSDYGYHLRGNEVLYNGFTGRKITSQIFIGPTYYQRLKHMVDDKIHSRARGPIQILNRQPMEGRSRDGGLRFGEMERDCQIAHGAAQFLRERLFEASDPYQVHVCNLCGIMAIANTRTHTYECRGCRNKTQISLVRMPYACKLLFQELMSMSIAPRMMSV

SEQ ID NO: 736 - protein, 2472 aa, Homo sapiens
MDPSGVKVLETAEDIQERRQQVLDRYHRFKELSTLRRQKLEDSYRFQFFQRDAEELEKWIQEKLQIASDENYKDPTNLQGKLQKHQAFEAEVQANSGAIVKLDETGNLMISEGHFASETIRTRLMELHRQWELLLEKMREKGIKLLQAQKLVQYLRECEDVMDWINDKEAIVTSEELGQDLEHVEVLQKKFEEFQTDMAAHEERVNEVNQFAAKLIQEQHPEEELIKTKQDEVNAAWQRLKGLALQRQGKLFGAAEVQRFNRDVDETISWIKEKEQLMASDDFGRDLASVQALLRKHEGLERDLAALEDKVKALCAEADRLQQSHPLSATQIQVKREELITNWEQIRTLAAERHARLNDSYRLQRFLADFRDLTSWVTEMKALINADELASDVAGAEALLDRHQEHKGEIDAHEDSFKSADESGQALLAAGHYASDEVREKLTVLSEERAALLELWELRRQQYEQCMDLQLFYRDTEQVDNWMSKQEAFLLNEDLGDSLDSVEALLKKHEDFEKSLSAQEEKITALDEFATKLIQNNHYAMEDVATRRDALLSRRNALHERAMRRRAQLADSFHLQQFFRDSDELKSWVNEKMKTATDEAYKDPSNLQGKVQKHQAFEAELSANQSRIDALEKAGQKLIDVNHYAKDEVAARMNEVISLWKKLLEATELKGIKLREANQQQQFNRNVEDIELWLYEVEGHLASDDYGKDLTNVQNLQKKHALLEADVAAHQDRIDGITIQARQFQDAGHFDAENIKKKQEALVARYEALKEPMVARKQKLADSLRLQQLFRDVEDEETWIREKEPIAASTNRGKDLIGVQNLLKKHQALQAEIAGHEPRIKAVTQKGNAMVEEGHFAAEDVKAKLHELNQKWEALKAKASQRRQDLEDSLQAQQYFADANEAESWMREKEPIVGSTDYGKDEDSAEALLKKHEALMSDLSAYGSSIQALREQAQSCRQQVAPTDDETGKELVLALYDYQEKSPREVTMKKGDILTLLNSTNKDWWKVEVNDRQGFVPAAYVKKLDPAQSASRENLLEEQGSIALRQEQIDNQTRITKEAGSVSLRMKQVEELYHSLLELGEKRKGMLEKSCKKFMLFREANELQQWINEKEAALTSEEVGADLEQVEVLQKKFDDFQKDLKANESRLKDINKVAEDLESEGLMAEEVQAVQQQEVYGMMPRDETDSKTASPWKSARLMVHTVATFNSIKELNERWRSLQQLAEERSQLLGSAHEVQRFHRDADETKEWIEEKNQALNTDNYGHDLASVQALQRKHEGFERDLAALGDKVNSLGETAERLIQSHPESAEDLQEKCTELNQAWSSLGKRADQRKAKLGDSHDLQRFLSDFRDLMSWINGIRGLVSSDELAKDVTGAEALLERHQEHRTEIDARAGTFQAFEQFGQQLLAHGHYASPEIKQKLDILDQERADLEKAWVQRRMMLDQCLELQLFHRDCEQAENWMAAREAFLNTEDKGDSLDSVEALIKKHEDFDKAINVQEEKIAALQAFADQLIAAGHYAKGDISSRRNEVLDRWRRLKAQMIEKRSKLGESQTLQQFSRDVDEIEAWISEKLQTASDESYKDPTNIQSKHQKHQAFEAELHANADRIRGVIDMGNSLIERGACAGSEDAVKARLAALADQWQFLVQKSAEKSQKLKEANKQQNFNTGIKDFDFWLSEVEALLASEDYGKDLASVNNLLKKHQLLEADISAHEDRLKDLNSQADSLMTSSAFDTSQVKDKRDTINGRFQKIKSMAASRRAKLNESHRLHQFFRDMDDEESWIKEKKLLVGSEDYGRDLTGVQNLRKKHKRLEAELAAHEPAIQGVLDTGKKLSDDNTIGKEEIQQRLAQFVEHWKELKQLAAARGQRLEESLEYQQFVANVEEEEAWINEKMTLVASEDYGDTLAAIQGLLKKHEAFETDFTVHKDRVNDVCTNGQDLIKKNNHHEENISSKMKGLNGKVSDLEKAAAQRKAKLDENSAFLQFNWKADVVESWIGEKENSLKTDDYGRDLSSVQTLLTKQETFDAGLQAFQQEGIANITALKDQLLAAKHVQSKAIEARHASLMKRWSQLLANSAARKKKLLEAQSHFRKVEDLFLTFAKKASAFNSWFENAEEDLTDPVRCNSLEEIKALREAHDAFRSSLSSAQADFNQLAELDRQIKSFRVASNPYTWFTMEALEETWRNLQKIIKERELELQKEQRRQEENDKLRQEFAQHANAFHQWIQETRTYLLDGSCMVEESGTLESQLEATKRKHQEIRAMRSQLKKIEDLGAAMEEALILDNKYTEHSTVGLAQQWDQLDQLGMRMQHNLEQQIQARNTTGVTEEALKEFSMMFKHFDKDKSGRLNHQEFKSCLRSLGYDLPMVEEGEPDPEFEAILDTVDPNRDGHVSLQEYMAFMISRETENVKSSEEIESAFRALSSEGKPYVTKEELYQNLTREQADYCVSHMKPYVDGKGRELPTAFDYVEFTRSLFVN

SEQ ID NO: 737 - protein, 1870 aa, Homo sapiens
MENEIFTPLLEQFMTSPLVTWVKTFGPLAAGNGTNLDEYVALVDGVFLNQVMLQINPKLESQRVNKKVNNDASLRMHNLSILVRQIKFYYQETLQQLIMMSLPNVLIIGKNPFSEQGTEEVKKLLLLLLGCAVQCQKKEEFIERIQGLDFDTKAAVAAHIQEVTHNQENVFDLQWMEVTDMSQEDIEPLLKNMALHLKRLIDERDEHSETIIELSEERDGLHFLPHASSSAQSPCGSPGMKRTESRQHLSVELADAKAKIRRLRQELEEKTEQLLDCKQELEQMEIELKRLQQENMNLLSDARSARMYRDELDALREKAVRVDKLESEVSRYKERLHDIEFYKARVEELKEDNQVLLETKTMLEDQLEGTRARSDKLHELEKENLQLKAKLHDMEMERDMDRKKIEELMEENMTLEMAQKQSMDESLHLGWELEQISRTSELSEAPQKSLGHEVNELTSSRLLKLEMENQSLTKTVEELRTTVDSVEGNASKILKMEKENQRLSKKVEILENEIVQEKQSLQNCQNLSKDLMKEKAQLEKTIETLRENSERQIKILEQENEHLNQTVSSLRQRSQISAEARVKDIEKENKILHESIKETSSKLSKIEFEKRQIKKELEHYKEKGERAEELENELHHLEKENELLQKKITNLKITCEKIEALEQENSELERENRKLKKTLDSFKNLTFQLESLEKENSQLDEENLELRRNVESLKCASMKMAQLQLENKELESEKEQLKKGLELLKASFKKTERLEVSYQGLDIENQRLQKTLENSNKKIQQLESELQDLEMENQTLQKNLEELKISSKRLEQLEKENKSLEQETSQLEKDKKQLEKENKRLRQQAEIKDTTLEENNVKIGNLEKENKTLSKEIGIYKESCVRLKELEKENKELVKRATIDIKTLVTLREDLVSEKLKTQQMNNDLEKLTHELEKIGLNKERLLHDEQSTDDRYKLLESKLESTLKKSLEIKEEKIAALEARLEESTNYNQQLRQELKTVKKNYEALKQRQDEERMVQSSPPISGEDNKWERESQETTRELLKVKDRLIEVERNNATLQAEKQALKTQLKQLETQNNNLQAQILALQRQTVSLQEQNTTLQTQNAKLQVENSTLNSQSTSLMNQNAQLLIQQSSLENENESVIKEREDLKSLYDSLIKDHEKLELLHERQASEYESLISKHGTLKSAHKNLEVEHRDLEDRYNQLLKQKGQLEDLEKMLKVEQEKMLLENKNHETVAAEYKKLCGENDRLNHTYSQLLKETEVLQTDHKNLKSLLNNSKLEQTRLEAEFSKLKEQYQQLDITSTKLNNQCELLSQLKGNLEEENRHLLDQIQTLMLQNRTLLEQNMESKDLFHVEQRQYIDKLNELRRQKEKLEEKIMDQYKFYDPSPPRRRGNWITLKMRKLIKSKKDINRERQKSLTLTPTRSDSSEGFLQLPHQDSQDSSSVGSNSLEDGQTLGTKKSSMVALKRLPFLRNRPKDKDKMKACYRRSMSMNDLVQSMVLAGQWTGSTENLEVPDDISTGKRRKELGAMAFSTTAINFSTVNSSAGFRSKQLVNNKDTTSFEDISPQGVSDDSSTGSRVHASRPASLDSGRTSTSNSNNNASLHEVKAGAVNNQSRPQSHSSGEFSLLHDHEAWSSSGSSPIQYLKRQTRSSPVLQHKISETLESRHHKIKTGSPGSEVVTLQQFLEESNKLTSVQIKSSSQENLLDEVMKSLSVSSDFLGKDKPVSCGLARSVSGKTPGDFYDRRTTKPEFLRPGPRKTEDTYFISSAGKPTPGTQGKIKLVKESSLSRQSKDSNPYATLPRASSVISTAEGTTRRTSIHDFLTKDSRLPISVDSPPAAADSNTTAASNVDKVQESRNSKSRSREQQSS

SEQ ID NO: 738 - protein, 2488 aa, Homo sapiens
MPAILVASKMKSGLPKPVHSAAPILHVPPARAGPQPCYLKLGSKVEVSKTTYPSQIPLKSQVLQGLQEPAGEGLPLRKSGSVENGFDTQIYTDWANHYLAKSGHKRLIRDLQQDVTDGVLLAQIIQVVANEKIEDINGCPKNRSQMIENIDACLNFLAAKGINIQGLSAEEIRNGNLKAILGLFFSLSRYKQQQQQPQKQHLSSPLPPAVSQVAGAPSQCQAGTPQQQVPVTPQAPCQPHQPAPHQQSKAQAEMQSSASSKDSSQSKIIRFTLGQKKISRLPGPTARVSAAGSEAKTRGGSTTANNRRSQSFNNYDKSKPVTSPPPPPSSHEKEPLASSASSHPGMSDNAPASLESGSSSTPTNCSTSSAIPQPGAATKPWRSKSLSVKHSATVSMLSVKPPGPEAPRPTPEAMKPAPNNQKSMLEKLKLFNSKGGSKAGEGPGSRDTSCERLETLPSFEESEELEAASRMLTTVGPASSSPKIALKGIAQRTFSRALTNKKSSLKGNEKEKEKQQREKDKEKSKDLAKRASVTERLDLKEEPKEDPSGAAVPEMPKKSSKIASFIPKGGKLNSAKKEPMAPSHSGIPKPGMKSMPGKSPSAPAPSKEGERSRSGKLSSGLPQQKPQLDGRHSSSSSSLASSEGKGPGGTTLNHSISSQTVSGSVGTTQTTGSNTVSVQLPQPQQQYNHPNTATVAPFLYRSQTDTEGNVTAESSSTGVSVEPSHFTKTGQPALEELTGEDPEARRLRTVKNIADLRQNLEETMSSLRGTQVTHSTLETTFDTNVTTEMSGRSILSLTGRPTPLSWRLGQSSPRLQAGDAPSMGNGYPPRANASRFINTESGRYVYSAPLRRQLASRGSSVCHVDVSDKAGDEMDLEGISMDAPGYMSDGDVLSKNIRTDDITSGYMTDGGLGLYTRRLNRLPDGMAVVRETLQRNTSLGLGDADSWDDSSSVSSGISDTIDNLSTDDINTSSSISSYANTPASSRKNLDVQTDAEKHSQVERNSLWSGDDVKKSDGGSDSGIKMEPGSKWRRNPSDVSDESDKSTSGKKNPVISQTGSWRRGMTAQVGITMPRTKPSAPAGALKTPGTGKTDDAKVSEKGRLSPKASQVKRSPSDAGRSSGDESKKPLPSSSRTPTANANSFGFKKQSGSAAGLAMITASGVTVTSRSATLGKIPKSSALVSRSAGRKSSMDGAQNQDDGYLALSSRTNLQYRSLPRPSKSNSRNGAGNRSSTSSIDSNISSKSAGLPVPKLREPSKTALGSSLPGLVNQTDKEKGISSDNESVASCNSVKVNPAAQPVSSPAQTSLQPGAKYPDVASPTLRRLFGGKPTKQVPIATAENMKNSVVISNPHATMTQQGNLDSPSGSGVLSSGSSSPLYSKNVDLNQSPLASSPSSAHSAPSNSLTWGTNASSSSAVSKDGLGFQSVSSLHTSCESIDISLSSGGVPSHNSSTGLIASSKDDSLTPFVRTNSVKTTLSESPLSSPAASPKFCRSTLPRKQDSDPHLDRNTLPKKGLRYTPTSQLRTQEDAKEWLRSHSAGGLQDTAANSPFSSGSSVTSPSGTRFNFSQLASPTTVTQMSLSNPTMLRTHSLSNADGQYDPYTDSRFRNSSMSLDEKSRTMSRSGSFRDGFEEESWEKSSVDNFVSRLHSSLHFSLPLFHHARYELVHGSSLSLVSSTSSVYSTPEEKCQSEIRKLRRELDASQEKVSALTTQLTANAHLVAAFEQSLGNMTIRLQSLTMTAEQKDSELNELRKTIELLKKQNAAAQAAINGVINTPELNCKGNGTAQSADLRIRRQHSSDSVSSINSATSHSSVGSNIESDSKKKKRKNWVNELRSSFKQAFGKKKSPKSASSHSDIEEMTDSSLPSSPKLPHNGSTGSTPLLRNSHSNSLISECMDSEAETVMQLRNELRDKEMKLTDIRLEALSSAHQLDQLREAMNRMQSEIEKLKAENDRLKSESQGSGCSRAPSQVSISASPRQSMGLSQHSLNLTESTSLDMLLDDTGECSARKEGGRHVKIVVSFQEEMKWKEDSRPHLFLIGCIGVSGKTKWDVLDGVVRRLFKEYIIHVDPVSQLGLNSDSVLGYSIGEIKRSNTSETPELLPCGYLVGENTTISVTVKGLAENSLDSLVFESLIPKPILQRYVSLLIEHRRIILSGPSGTGKTYLANRLSEYIVLREGRELTDGVIATFNVDHKSSKELRQYLSNLADQCNSENNAVDMPLVIILDNLHHVSSLGEIFNGLLNCKYHKCPYIIGTMNQATSSTPNLQLHHNFRWVLCANHTEPVKGFLGRFLRRKLMETEISGRVRNMELVKIIDWIPKVWHHLNRFLEAHSSSDVTIGPRLFLSCPIDVDGSRVWFTDLWNYSIIPYLLEAVREGLQLYGRRAPWEDPAKWVMDTYPWAASPQQHEWPPLLQLRPEDVGFDGYSMPREGSTSKQMPPSDAEGDPLMNMLMRLQEAANYSSPQSYDSDSNSNSHHDDILDSSLESTL

SEQ ID NO: 739 - protein, 1691 aa, Homo sapiens
MKLRGVSLAAGLFLLALSLWGQPAEAAACYGCSPGSKCDCSGIKGEKGERGFPGLEGHPGLPGFPGPEGPPGPRGQKGDDGIPGPPGPKGIRGPPGLPGFPGTPGLPGMPGHDGAPGPQGIPGCNGTKGERGFPGSPGFPGLQGPPGPPGIPGMKGEPGSIIMSSLPGPKGNPGYPGPPGIQGLPGPTGIPGPIGPPGPPGLMGPPGPPGLPGPKGNMGLNFQGPKGEKGEQGLQGPPGPPGQISEQKRPIDVEFQKGDQGLPGDRGPPGPPGIRGPPGPPGGEKGEKGEQGEPGKRGKPGKDGENGQPGIPGLPGDPGYPGEPGRDGEKGQKGDTGPPGPPGLVIPRPGTGITIGEKGNIGLPGLPGEKGERGFPGIQGPPGLPGPPGAAVMGPPGPPGFPGERGQKGDEGPPGISIPGPPGLDGQPGAPGLPGPPGPAGPHIPPSDEICEPGPPGPPGSPGDKGLQGEQGVKGDKGDTCFNCIGTGISGPPGQPGLPGLPGPPGSLGFPGQKGEKGQAGATGPKGLPGIPGAPGAPGFPGSKGEPGDILTFPGMKGDKGELGSPGAPGLPGLPGTPGQDGLPGLPGPKGEPGGITFKGERGPPGNPGLPGLPGNIGPMGPPGFGPPGPVGEKGIQGVAGNPGQPGIPGPKGDPGQTITQPGKPGLPGNPGRDGDVGLPGDPGLPGQPGLPGIPGSKGEPGIPGIGLPGPPGPKGFPGIPGPPGAPGTPGRIGLEGPPGPPGFPGPKGEPGFALPGPPGPPGLPGFKGALGPKGDRGFPGPPGPPGRTGLDGLPGPKGDVGPNGQPGPMGPPGLPGIGVQGPPGPPGIPGPIGQPGLHGIPGEKGDPGPPGLDVPGPPGERGSPGIPGAPGPIGPPGSPGLPGKAGASGFPGTKGEMGMMGPPGPPGPLGIPGRSGVPGLKGDDGLQGQPGLPGPTGEKGSKGEPGLPGPPGPMDPNLLGSKGEKGEPGLPGIPGVSGPKGYQGLPGDPGQPGLSGQPGLPGPPGPKGNPGLPGQPGLIGPPGLKGTIGDMGFPGPQGVEGPPGPSGVPGQPGSPGLPGQKGDKGDPGISSIGLPGLPGPKGEPGLPGYPGNPGIKGSVGDPGLPGLPGTPGAKGQPGLPGFPGTPGPPGPKGISGPPGNPGLPGEPGPVGGGGHPGQPGPPGEKGKPGQDGIPGPAGQKGEPGQPGFGNPGPPGLPGLSGQKGDGGLPGIPGNPGLPGPKGEPGFHGFPGVQGPPGPPGSPGPALEGPKGNPGPQGPPGRPGPTGFQGLPGPEGPPGLPGNGGIKGEKGNPGQPGLPGLPGLKGDQGPPGLQGNPGRPGLNGMKGDPGLPGVPGFPGMKGPSGVPGSAGPEGEPGLIGPPGPPGLPGPSGQSIIIKGDAGPPGIPGQPGLKGLPGPQGPQGLPGPTGPPGDPGRNGLPGFDGAGGRKGDPGLPGQPGTRGLDGPPGPDGLQGPPGPPGTSSVAHGFLITRHSQTTDAPQCPQGTLQVYEGFSLLYVQGNKRAHGQDLGTAGSCLRRFSTMPFMFCNINNVCNFASRNDYSYWLSTPEPMPMSMQPLKGQSIQPFISRCAVCEAPAVVIAVHSQTIQIPHCPQGWDSLWIGYSFMMHTSAGAEGSGQALASPGSCLEEFRSAPFIECHGRGTCNYYANSYSFWLATVDVSDMFSKPQSETLKAGDLRTRISRCQVCMKRT

SEQ ID NO: 740 - protein, 1294 aa, Homo sapiens
MAMGDDKSFDDEESVDGNRPSSAASAFKVPAPKTSGNPANSARKPGSAGGPKVGGASKEGGAGAVDEDDFIKAFTDVPSIQIYSSRELEETLNKIREILSDDKHDWDQRANALKKIRSLLVAGAAQYDCFFQHLRLLDGALKLSAKDLRSQVVREACITVAHLSTVLGNKFDHGAEAIVPTLFNLVPNSAKVMATSGCAAIRFIIRHTHVPRLIPLITSNCTSKSVPVRRRSFEFLDLLLQEWQTHSLERHAAVLVETIKKGIHDADAEARVEARKTYMGLRNHFPGEAETLYNSLEPSYQKSLQTYLKSSGSVASLPQSDRSSSSSQESLNRPFSSKWSTANPSTVAGRVSAGSSKASSLPGSLQRSRSDIDVNAAAGAKAHHAAGQSVRSGRLGAGALNAGSYASLEDTSDKLDGTASEDGRVRAKLSAPLAGMGNAKADSRGRSRTKMVSQSQPGSRSGSPGRVLTTTALSTVSSGVQRVLVNSASAQKRSKIPRSQGCSREASPSRLSVARSSRIPRPSVSQGCSREASRESSRDTSPVRSFQPLASRHHSRSTGALYAPEVYGASGPGYGISQSSRLSSSVSAMRVLNTGSDVEEAVADALKKPARRRYESYGMHSDDDANSDASSACSERSYSSRNGSIPTYMRQTEDVAEVLNRCASSNWSERKEGLLGLQNLLKNQRTLSRVELKRLCEIFTRMFADPHGKRVFSMFLETLVDFIQVHKDDLQDWLFVLLTQLLKKMGADLLGSVQAKVQKALDVTRESFPNDLQFNILMRFTVDQTQTPSLKVKVAILKYIETLAKQMDPGDFINSSETRLAVSRVITWTTEPKSSDVRKAAQSVLISLFELNTPEFTMLLGALPKTFQDGATKLLHNHLRNTGNGTQSSMGSPLTRPTPRSPANWSSPLTSPTNTSQNTLSPSAFDYDTENMNSEDIYSSLRGVTEAIQNFSFRSQEDMNEPLKRDSKKDDGDSMCGGPGMSDPRAGGDATDSSQTALDNKASLLHSMPTHSSPRSRDYNPYNYSDSISPFNKSALKEAMFDDDADQFPDDLSLDHSDLVAELLKELSNHNERVEERKIALYELMKLTQEESFSVWDEHFKTILLLLLETLGDKEPTIRALALKVLREILRHQPARFKNYAELTVMKTLEAHKDPHKEVVRSAEEAASVLATSISPEQCIKVLCPIIQTADYPINLAAIKMQTKVIERVSKETLNLLLPEIMPGLIQGYDNSESSVRKACVFCLVAVHAVIGDELKPHLSQLTGSKMKLLNLYIKRAQTGSGGADPTTDVSGQS

SEQ ID NO: 741 - protein, 2046 aa, Homo sapiens
MELAHSLLLNEEAYNQLGEVQKAEFIFEWLRYLEKLLLATSRNDVREKQKTLVEQLLSLLNSSPGPPTRKLLAKNLAILYSIGDTFSVHEAIDKCNDLIRSKDDSPSYLPTKLAAVVCLGSLYKKLGRILGNTFTDTVGNILKAMKSAESQGRYEIMLSLQNILNGLGAAAAPCHRDVYKAARSCLTDRSMAVRCAAAKCLLELQNEAIFMWSTDLDSVATLCFKSFEGSNYDVRISVSKLLGIILAKAVISKHPGTAASRQSIRRVSLEEVLELLGTGFLRGSSGFLRASGDMLKGTSSVSRDVRVGVTQAYVVFVSTLGGAWLEKNFAAFFSHILSLASPSHPKATQTQIDAVCCRRCVSFILRTTIGGLLGEKAQLAAVKDICQAIWKLKKVMDAVMSDGNLETRLGSTDVAASQHMLVCALQELGNLIHNLGTTAAPLLQDSSTGLLDSILSVILHPSISVRLAAAWCLHCIAVALPSYLTPLLDRCLERLTGHKSSPEAVTGFSFAVAALLGAVKHCPLGIPHGKGKIIMTLAEDLLCSAAQNSRLSAQRTQAGWLLISALMTLGPAVVSHHLARVLLLWKCVFPASPKDLETEKSRGDSFTWQVTLEGRAGALCAIKSFVSHCGDLLTEEVTQRLLPPLPCAVDLLTQLSSILKMYGSPLKTPSVVYRQRLYELLILLPPETYEGNLCAILRELAADLTAPDIQVAASTFLLPPLCHQDDLLILSPFLQETDHRFIEEQLLLGNGVACGSLEYDPYSIYEKDVEGDSVPKPLPPALSVISSASKLFGVVCAHVGETQRLLILEQLLDSIKHTKGARQQVVQLHVVSSVSSFLKYVAGSKGCLGPEEMKRFALTLVMGALESPNPLLRCAAAESWARLAQVVDDGAFTAGLAQVSFDKLKSARDVVTRTGHSLALGSLHRYLGGISSSQHLNSCIGILYTLAQDSTSPDVQTWALHSLSLIIDSAGPLYYVHVEPTLSLIIMLLLNVPPTHAEVHQSLGRCLNALITTLGPELQGNSTSISTLRTSCLLGCAVMQDNPDCLVQAQAISCLQQLHMFAPRHVNLSSLVSCLCVNLCSPYLLLRRAVLACLRQLVQREAAEVSEHAVMLAKDSREELTPDANIREVGLEGALLILLDKETDERLCHDIKETLNYMLTSMAVEKLSLWLKLCKDVLAASADFTAVTCVDTMQEEEGDKGDDASVLTTRRDEKSHPFTNPRWATRVFAAECVCRIINQCENANSAHFDIALAQEMKKRDSRNDFLVLHLADLIRMAFMAATDHSDQLRLSGLEMLLVVIRRFATVPEPEFPGHVILEQYQANVGAALRPAFTSETPPDVTAKACQVCSAWIASGVVSDLNDLRRVHQLLVSSLTKIQAGKEALSHLYNESASTMEILAVLKAWAEVYIIAVQRHKNHRQPLKTTTCLEDGIRNGSCSSDGLLDLVYADLGTLSRLWLAALQDFALLTLPSEFASQLPAEGGAFYTAETSENAKLHYYNSWALILHATALWLTSTGFVVADPDEGASNLSRPVTPTSMCQGSSSGATIKSPEDVYTDRFHLILGISVEFLCSLRSDATMESITACLHALQALLDVPWPRSKIGSDQDLGIELLNVLHRVILTRESPSIQLASLEVVRQIICAAQEHVKEKRRSAEVDDGAAEKETLPEFGEGKDTGGLVPGKSLVFATLELCVCILVRQLPELNPKLTGSPGVKATKPQILLEDGSRLVSAALVILSELPAVCSPEGSISILPTILYLTIGVLRETAVKLPGGQLSSTVAASLQALKGILSSPMARAEKSRTAWTDLLRSALTTILDCWDPVDETHQELDEVSLLTAITVFILSTSPEVTTIPCLQKRCIDKFKATLEIKDPVVQIKTYQLLHSIFQYPNPAVSYPYIYSLASCIMEKLQEIDKRKPENTAELEIFQEGIKVLETLVTVAEEHHRAQLVACLLPILISFLLDENSLGSATSIMRNLHDFALQNLMQIGPQYSSVFKSLVASSPALKARLEAAIKGNQESVKVKIPTSKYTKSPGKNSSIQLKTSFL

SEQ ID NO: 742 - protein, 1945 aa, Homo sapiens
MAQKGQLSDDEKFLFVDKNFINSPVAQADWAAKRLVWVPSEKQGFEAASIKEEKGDEVVVELVENGKKVTVGKDDIQKMNPPKFSKVEDMAELTCLNEASVLHNLRERYFSGLIYTYSGLFCVVVNPYKHLPIYSEKIVDMYKGKKRHEMPPHIYAIADTAYRSMLQDREDQSILCTGESGAGKTENTKKVIQYLAVVASSHKGKKDTSITQGPSFAYGELEKQLLQANPILEAFGNAKTVKNDNSSRFGKFIRINFDVTGYIVGANIETYLLEKSRAIRQARDERTFHIFYYMIAGAKEKMRSDLLLEGFNNYTFLSNGFVPIPAAQDDEMFQETVEAMAIMGFSEEEQLSILKVVSSVLQLGNIVFKKERNTDQASMPDNTAAQKVCHLMGINVTDFTRSILTPRIKVGRDVVQKAQTKEQADFAVEALAKATYERLFRWILTRVNKALDKTHRQGASFLGILDIAGFEIFEVNSFEQLCINYTNEKLQQLFNHTMFILEQEEYQREGIEWNFIDFGLDLQPCIELIERPNNPPGVLALLDEECWFPKATDKSFVEKLCTEQGSHPKFQKPKQLKDKTEFSIIHYAGKVDYNASAWLTKNMDPLNDNVTSLLNASSDKFVADLWKDVDRIVGLDQMAKMTESSLPSASKTKKGMFRTVGQLYKEQLGKLMTTLRNTTPNFVRCIIPNHEKRSGKLDAFLVLEQLRCNGVLEGIRICRQGFPNRIVFQEFRQRYEILAANAIPKGFMDGKQACILMIKALELDPNLYRIGQSKIFFRTGVLAHLEEERDLKITDVIMAFQAMCRGYLARKAFAKRQQQLTAMKVIQRNCAAYLKLRNWQWWRLFTKVKPLLQVTRQEEEMQAKEDELQKTKERQQKAENELKELEQKHSQLTEEKNLLQEQLQAETELYAEAEEMRVRLAAKKQELEEILHEMEARLEEEEDRGQQLQAERKKMAQQMLDLEEQLEEEEAARQKLQLEKVTAEAKIKKLEDEILVMDDQNNKLSKERKLLEERISDLTTNLAEEEEKAKNLTKLKNKHESMISELEVRLKKEEKSRQELEKLKRKLEGDASDFHEQIADLQAQIAELKMQLAKKEEELQAALARLDDEIAQKNNALKKIRELEGHISDLQEDLDSERAARNKAEKQKRDLGEELEALKTELEDTLDSTATQQELRAKREQEVTVLKKALDEETRSHEAQVQEMRQKHAQAVEELTEQLEQFKRAKANLDKNKQTLEKENADLAGELRVLGQAKQEVEHKKKKLEAQVQELQSKCSDGERARAELNDKVHKLQNEVESVTGMLNEAEGKAIKLAKDVASLSSQLQDTQELLQEETRQKLNVSTKLRQLEEERNSLQDQLDEEMEAKQNLERHISTLNIQLSDSKKKLQDFASTVEALEEGKKRFQKEIENLTQQYEEKAAAYDKLEKTKNRLQQELDDLVVDLDNQRQLVSNLEKKQRKFDQLLAEEKNISSKYADERDRAEAEAREKETKALSLARALEEALEAKEELERTNKMLKAEMEDLVSSKDDVGKNVHELEKSKRALETQMEEMKTQLEELEDELQATEDAKLRLEVNMQALKGQFERDLQARDEQNEEKRRQLQRQLHEYETELEDERKQRALAAAAKKKLEGDLKDLELQADSAIKGREEAIKQLRKLQAQMKDFQRELEDARASRDEIFATAKENEKKAKSLEADLMQLQEDLAAAERARKQADLEKEELAEELASSLSGRNALQDEKRRLEARIAQLEEELEEEQGNMEAMSDRVRKATQQAEQLSNELATERSTAQKNESARQQLERQNKELRSKLHEMEGAVKSKFKSTIAALEAKIAQLEEQVEQEAREKQAATKSLKQKDKKLKEILLQVEDERKMAEQYKEQAEKGNARVKQLKRQLEEAEEESQRINANRRKLQRELDEATESNEAMGREVNALKSKLRGPPPQETSQ

SEQ ID NO: 743 - protein, 1897 aa, Homo sapiens
MAQAAKQLKKIKDIEAQALQEQKEKEESNRKRRNRSRDRKKKADAATSFLRAARSGNLDKALDHLRNGVDINTCNQNGLNGLHLASKEGHVKMVVELLHKEIILETTTKKGNTALHIAALAGQDEVVRELVNYGANVNAQSQKGFTPLYMAAQENHLEVVKFLLENGANQNVATEDGFTPLAVALQQGHENVVAHLINYGTKGKVRLPALHIAARNDDTRTAAVLLQNDPNPDVLSKTGFTPLHIAAHYENLNVAQLLLNRGASVNFTPQNGITPLHIASRRGNVIMVRLLLDRGAQIETKTKDELTPLHCAARNGHVRISEILLDHGAPIQAKTKNGLSPIHMAAQGDHLDCVRLLLQYDAEIDDITLDHLTPLHVAAHCGHHRVAKVLLDKGAKPNSRALNGFTPLHIACKKNHVRVMELLLKTGASIDAVTESGLTPLHVASFMGHLPIVKNLLQRGASPNVSNVKVETPLHMAARAGHTEVAKYLLQNKAKVNAKAKDDQTPLHCAARIGHTNMVKLLLENNANPNLATTAGHTPLHIAAREGHVETVLALLEKEASQACMTKKGFTPLHVAAKYGKVRVAELLLERDAHPNAAGKNGLTPLHVAVHHNNLDIVKLLLPRGGSPHSPAWNGYTPLHIAAKQNQVEVARSLLQYGGSANAESVQGVTPLHLAAQEGHAEMVALLLSKQANGNLGNKSGLTPLHLVAQEGHVPVADVLIKHGVMVDATTRMGYTPLHVASHYGNIKLVKFLLQHQADVNAKTKLGYSPLHQAAQQGHTDIVTLLLKNGASPNEVSSDGTTPLAIAKRLGYISVTDVLKVVTDETSFVLVSDKHRMSFPETVDEILDVSEDEGTAHITIMGEELISFKAERRDSRDVDEEKELLDFVPKLDQVVESPAIPRIPCAMPETVVIRSEEQEQASKEYDEDSLIPSSPATETSDNISPVASPVHTGFLVSFMVDARGGSMRGSRHNGLRVVIPPRTCAAPTRITCRLVKPQKLSTPPPLAEEEGLASRIIALGPTGAQFLSPVIVEIPHFASHGRGDRELVVLRSENGSVWKEHRSRYGESYLDQILNGMDEELGSLEELEKKRVCRIITTDFPLYFVIMSRLCQDYDTIGPEGGSLKSKLVPLVQATFPENAVTKRVKLALQAQPVPDELVTKLLGNQATFSPIVTVEPRRRKFHRPIGLRIPLPPSWTDNPRDSGEGDTTSLRLLCSVIGGTDQAQWEDITGTTKLVYANECANFTTNVSARFWLSDCPRTAEAVNFATLLYKELTAVPYMAKFVIFAKMNDPREGRLRCYCMTDDKVDKTLEQHENFVEVARSRDIEVLEGMSLFAELSGNLVPVKKAAQQRSFHFQSFRENRLAMPVKVRDSSREPGGSLSFLRKAMKYEDTQHILCHLNITMPPCAKGSGAEDRRRTPTPLALRYSILSESTPGSLSGTEQAEMKMAVISEHLGLSWAELARELQFSVEDINRIRVENPNSLLEQSVALLNLWVIREGQNANMENLYTALQSIDRGEIVNMLEGSGRQSRNLKPDRRHTDRDYSLSPSQMNGYSSLQDELLSPASLGCALSSPLRADQYWNEVAVLDAIPLAATEHDTMLEMSDMQVWSAGLTPSLVTAEDSSLECSKAEDSDATGHEWKLEGALSEEPRGPELGSLELVEDDTVDSDATNGLIDLLEQEEGQRSEEKLPGSKRQDDATGAGQDSENEVSLVSGHQRGQARITHSPTVSQVTERSQDRLQDWDADGSIVSYLQDAAQGSWQEEVTQGPHSFQGTSTMTEGLEPGGSQEYEKVLVSVSEHTWTEQPEAESSQADRDRRQQGQEEQVQEAKNTFTQVVQGNEFQNIPGEQVTEEQFTDEQGNIVTKKIIRKVVRQIDLSSADAAQEHEEDHTSTPNP

SEQ ID NO: 744 - protein, 2492 aa, Homo sapiens
MTAEPMSESKLNTLVQKLHDFLAHSSEESEETSSPPRLAMNQNTDKISGSGSNSDMMENSKEEGTSSSEKSKSSGSSRSKRKPSIVTKYVESDDEKPLDDETVNEDASNENSENDITMQSLPKGTVIVQPEPVLNEDKDDFKGPEFRSRSKMKTENLKKRGEDGLHGIVSCTACGQQVNHFQKDSIYRHPSLQVLICKNCFKYYMSDDISRDSDGMDEQCRWCAEGGNLICCDFCHNAFCKKCILRNLGRKELSTIMDENNQWYCYICHPEPLLDLVTACNSVFENLEQLLQQNKKKIKVDSEKSNKVYEHTSRFSPKKTSSNCNGEEKKLDDSCSGSVTYSYSALIVPKEMIKKAKKLIETTANMNSSYVKFLKQATDNSEISSATKLRQLKAFKSVLADIKKAHLALEEDLNSEFRAMDAVNKEKNTKEHKVIDAKFETKARKGEKPCALEKKDISKSEAKLSRKQVDSEHMHQNVPTEEQRTNKSTGGEHKKSDRKEEPQYEPANTSEDLDMDIVSVPSSVPEDIFENLETAMEVQSSVDHQGDGSSGTEQEVESSSVKLNISSKDNRGGIKSKTTAKVTKELYVKLTPVSLSNSPIKGADCQEVPQDKDGYKSCGLNPKLEKCGLGQENSDNEHLVENEVSLLLEESDLRRSPRVKTTPLRRPTETNPVTSNSDEECNETVKEKQKLSVPVRKKDKRNSSDSAIDNPKPNKLPKSKQSETVDQNSDSDEMLAILKEVSRMSHSSSSDTDINEIHTNHKTLYDLKTQAGKDDKGKRKRKSSTSGSDFDTKKGKSAKSSIISKKKRQTQSESSNYDSELEKEIKSMSKIGAARTTKKRIPNTKDFDSSEDEKHSKKGMDNQGHKNLKTSQEGSSDDAERKQERETFSSAEGTVDKDTTIMELRDRLPKKQQASASTDGVDKLSGKEQSFTSLEVRKVAETKEKSKHLKTKTCKKVQDGLSDIAEKFLKKDQSDETSEDDKKQSKKGTEEKKKPSDFKKKVIKMEQQYESSSDGTEKLPEREEICHFPKGIKQIKNGTTDGEKKSKKIRDKTSKKKDELSDYAEKSTGKGDSCDSSEDKKSKNGAYGREKKRCKLLGKSSRKRQDCSSSDTEKYSMKEDGCNSSDKRLKRIELRERRNLSSKRNTKEIQSGSSSSDAEESSEDNKKKKQRTSSKKKAVIVKEKKRNSLRTSTKRKQADITSSSSSDIEDDDQNSIGEGSSDEQKIKPVTENLVLSSHTGFCQSSGDEALSKSVPVTVDDDDDDNDPENRIAKKMLLEEIKANLSSDEDGSSDDEPEEGKKRTGKQNEENPGDEEAKNQVNSESDSDSEESKKPRYRHRLLRHKLTVSDGESGEEKKTKPKEHKEVKGRNRRKVSSEDSEDSDFQESGVSEEVSESEDEQRPRTRSAKKAELEENQRSYKQKKKRRRIKVQEDSSSENKSNSEEEEEEKEEEEEEEEEEEEEEEDENDDSKSPGKGRKKIRKILKDDKLRTETQNALKEEEERRKRIAEREREREKLREVIEIEDASPTKCPITTKLVLDEDEETKEPLVQVHRNMVIKLKPHQVDGVQFMWDCCCESVKKTKKSPGSGCILAHCMGLGKTLQVVSFLHTVLLCDKLDFSTALVVCPLNTALNWMNEFEKWQEGLKDDEKLEVSELATVKRPQERSYMLQRWQEDGGVMIIGYEMYRNLAQGRNVKSRKLKEIFNKALVDPGPDFVVCDEGHILKNEASAVSKAMNSIRSRRRIILTGTPLQNNLIEYHCMVNFIKENLLGSIKEFRNRFINPIQNGQCADSTMVDVRVMKKRAHILYEMLAGCVQRKDYTALTKFLPPKHEYVLAVRMTSIQCKLYQYYLDHLTGVGNNSEGGRGKAGAKLFQDFQMLSRIWTHPWCLQLDYISKENKGYFDEDSMDEFIASDSDETSMSLSSDDYTKKKKKGKKGKKDSSSSGSGSDNDVEVIKVWNSRSRGGGEGNVDETGNNPSVSLKLEESKATSSSNPSSPAPDWYKDFVTDADAEVLEHSGKMVLLFEILRMAEEIGDKVLVFSQSLISLDLIEDFLELASREKTEDKDKPLIYKGEGKWLRNIDYYRLDGSTTAQSRKKWAEEFNDETNVRGRLFIISTKAGSLGINLVAANRVIIFDASWNPSYDIQSIFRVYRFGQTKPVYVYRFLAQGTMEDKIYDRQVTKQSLSFRVVDQQQVERHFTMNELTELYTFEPDLLDDPNSEKKKKRDTPMLPKDTILAELLQIHKEHIVGYHEHDSLLDHKEEEELTEEERKAAWAEYEAEKKGLTMRFNIPTGTNLPPVSFNSQTPYIPFNLGALSAMSNQQLEDLINQGREKVVEATNSVTAVRIQPLEDIISAVWKENMNLSEAQVQALALSRQASQELDVKRREAIYNDVLTKQQMLISCVQRILMNRRLQQQYNQQQQQQMTYQQATLGHLMMPKPPNLIMNPSNYQQIDMRGMYQPVAGGMQPPPLQRAPPPMRSKNPGPSQGKSM

SEQ ID NO: 745 - protein, 2069 aa, Homo sapiens
MSQPPLLPASAETRKFTRALSKPGTAAELRQSVSEVVRGSVLLAKPKLIEPLDYENVIVQKKTQILNDCLREMLLFPYDDFQTAILRRQGRYICSTVPAKAEEEAQSLFVTECIKTYNSDWHLVNYKYEDYSGEFRQLPNKVVKLDKLPVHVYEVDEEVDKDEDAASLGSQKGGITKHGWLYKGNMNSAISVTMRSFKRRFFHLIQLGDGSYNLNFYKDEKISKEPKGSIFLDSCMGVVQNNKVRRFAFELKMQDKSSYLLAADSEVEMEEWITILNKILQLNFEAAMQEKRNGDSHEDDEQSKLEGSGSGLDSYLPELAKSAREAEIKLKSESRVKLFYLDPDAQKLDFSSAEPEVKSFEEKFGKRILVKCNDLSFNLQCCVAENEEGPTTNVEPFFVTLSLFDIKYNRKISADFHVDLNHFSVRQMLATTSPALMNGSGQSPSVLKGILHEAAMQYPKQGIFSVTCPHPDIFLVARIEKVLQGSITHCAEPYMKSSDSSKVAQKVLKNAKQACQRLGQYRMPFAWAARTLFKDASGNLDKNARFSAIYRQDSNKLSNDDMLKLLADFRKPEKMAKLPVILGNLDITIDNVSSDFPNYVNSSYIPTKQFETCSKTPITFEVEEFVPCIPKHTQPYTIYTNHLYVYPKYLKYDSQKSFAKARNIAICIEFKDSDEEDSQPLKCIYGRPGGPVFTRSAFAAVLHHHQNPEFYDEIKIELPTQLHEKHHLLLTFFHVSCDNSSKGSTKKRDVVETQVGYSWLPLLKDGRVVTSEQHIPVSANLPSGYLGYQELGMGRHYGPEIKWVDGGKPLLKISTHLVSTVYTQDQHLHNFFQYCQKTESGAQALGNELVKYLKSLHAMEGHVMIAFLPTILNQLFRVLTRATQEEVAVNVTRVIIHVVAQCHEEGLESHLRSYVKYAYKAEPYVASEYKTVHEELTKSMTTILKPSADFLTSNKLLKYSWFFFDVLIKSMAQHLIENSKVKLLRNQRFPASYHHAVETVVNMLMPHITQKFRDNPEASKNANHSLAVFIKRCFTFMDRGFVFKQINNYISCFAPGDPKTLFEYKFEFLRVVCNHEHYIPLNLPMPFGKGRIQRYQDLQLDYSLTDEFCRNHFLVGLLLREVGTALQEFREVRLIAISVLKNLLIKHSFDDRYASRSHQARIATLYLPLFGLLIENVQRINVRDVSPFPVNAGMTVKDESLALPAVNPLVTPQKGSTLDNSLHKDLLGAISGIASPYTTSTPNINSVRNADSRGSLISTDSGNSLPERNSEKSNSLDKHQQSSTLGNSVVRCDKLDQSEIKSLLMCFLYILKSMSDDALFTYWNKASTSELMDFFTISEVCLHQFQYMGKRYIARTGMMHARLQQLGSLDNSLTFNHSYGHSDADVLHQSLLEANIATEVCLTALDTLSLFTLAFKNQLLADHGHNPLMKKVFDVYLCFLQKHQSETALKNVFTALRSLIYKFPSTFYEGRADMCAALCYEILKCCNSKLSSIRTEASQLLYFLMRNNFDYTGKKSFVRTHLQVIISVSQLIADVVGIGGTRFQQSLSIINNCANSDRLIKHTSFSSDVKDLTKRIRTVLMATAQMKEHENDPEMLVDLQYSLAKSYASTPELRKTWLDSMARIHVKNGDLSEAAMCYVHVTALVAEYLTRKEAVQWEPPLLPHSHSACLRRSRGGVFRQGCTAFRVITPNIDEEASMMEDVGMQDVHFNEDVLMELLEQCADGLWKAERYELIADIYKLIIPIYEKRRDFERLAHLYDTLHRAYSKVTEVMHSGRRLLGTYFRVAFFGQAAQYQFTDSETDVEGFFEDEDGKEYIYKEPKLTPLSEISQRLLKLYSDKFGSENVKMIQDSGKVNPKDLDSKYAYIQVTHVIPFFDEKELQERKTEFERSHNIRRFMFEMPFTQTGKRQGGVEEQCKRRTILTAIHCFPYVKKRIPVMYQHHTDLNPIEVAIDEMSKKVAELRQLCSSAEVDMIKLQLKLQGSVSVQVNAGPLAYARAFLDDTNTKRYPDNKVKLLKEVFRQFVEACGQALAVNERLIKEDQLEYQEEMKANYREMAKELSEIMHEQLG

SEQ ID NO: 746 - protein, 122 aa, Homo sapiens
QVELVESGGGVVZPGRSLRLSCAASGFTFSNYAMHWVRQPPGKGLEWVAVISYBGBBKYYABSVKGRFTISRDBSKBTLYLQMNSLRAEBTAVYYCARDRPLYGBYRAFNYWGQGTLVTVSS

SEQ ID NO: 747 - protein, 2432 aa, Homo sapiens
MPAILVASKMKSGLPKPVHSAAPILHVPPARAGPQPCYLKLGSKVEVSKTTYPSQIPLKSQVLQGLQEPAGEGLPLRKSGSVENGFDTQIYTDWANHYLAKSGHKRLIRDLQQDVTDGVLLAQIIQVVANEKIEDINGCPKNRSQMIENIDACLNFLAAKGINIQGLSAEEIRNGNLKAILGLFFSLSRYKQQQQQPQKQHLSSPLPPAVSQVAGAPSQCQAGTPQQQVPVTPQAPCQPHQPAPHQQSKAQAEMQSRLPGPTARVSAAGSEAKTRGGSTTANNRRSQSFNNYDKSKPVTSPPPPPSSHEKEPLASSASSHPGMSDNAPASLESGSSSTPTNCSTSSAIPQPGAATKPWRSKSLSVKHSATVSMLSVKPPGPEAPRPTPEAMKPAPNNQKSMLEKLKLFNSKGGSKAGEGPGSRDTSCERLETLPSFEESEELEAASRMLTTVGPASSSPKIALKGIAQRTFSRALTNKKSSLKGNEKEKEKQQREKDKEKSKDLAKRASVTERLDLKEEPKEDPSGAAVPEMPKKSSKIASFIPKGGKLNSAKKEPMAPSHSGIPKPGMKSMPGKSPSAPAPSKEGERSRSGKLSSGLPQQKPQLDGRHSSSSSSLASSEGKGPGGTTLNHSISSQTVSGSVGTTQTTGSNTVSVQLPQPQQQYNHPNTATVAPFLYRSQTDTEGNVTAESSSTGVSVEPSHFTKTGQPALEELTGEDPEARRLRTVKNIADLRQNLEETMSSLRGTQVTHSTLETTFDTNVTTEMSGRSILSLTGRPTPLSWRLGQSSPRLQAGDAPSMGNGYPPRANASRFINTESGRYVYSAPLRRQLASRGSSVCHVDVSDKAGDEMDLEGISMDAPGYMSDGDVLSKNIRTDDITSGYMTDGGLGLYTRRLNRLPDGMAVVRETLQRNTSLGLGDADSWDDSSSVSSGISDTIDNLSTDDINTSSSISSYANTPASSRKNLDVQTDAEKHSQVERNSLWSGDDVKKSDGGSDSGIKMEPGSKWRRNPSDVSDESDKSTSGKKNPVISQTGSWRRGMTAQVGITMPRTKPSAPAGALKTPGTGKTDDAKVSEKGRLSPKASQVKRSPSDAGRSSGDESKKPLPSSSRTPTANANSFGFKKQSGSAAGLAMITASGVTVTSRSATLGKIPKSSALVSRSAGRKSSMDGAQNQDDGYLALSSRTNLQYRSLPRPSKSNSRNGAGNRSSTSSIDSNISSKSAGLPVPKLREPSKTALGSSLPGLVNQTDKEKGISSDNESVASCNSVKVNPAAQPVSSPAQTSLQPGAKYPDVASPTLRRLFGGKPTKQVPIATAENMKNSVVISNPHATMTQQGNLDSPSGSGVLSSGSSSPLYSKNVDLNQSPLASSPSSAHSAPSNSLTWGTNASSSSAVSKDGLGFQSVSSLHTSCESIDISLSSGGVPSHNSSTGLIASSKDDSLTPFVRTNSVKTTLSESPLSSPAASPKFCRSTLPRKQDSDPHLDRNTLPKKGLRYTPTSQLRTQEDAKEWLRSHSAGGLQDTAANSPFSSGSSVTSPSGTRFNFSQLASPTTVTQMSLSNPTMLRTHSLSNADGQYDPYTDSRFRNSSMSLDEKSRTMSRSGSFRDGFEEVHGSSLSLVSSTSSVYSTPEEKCQSEIRKLRRELDASQEKVSALTTQLTANAHLVAAFEQSLGNMTIRLQSLTMTAEQKDSELNELRKTIELLKKQNAAAQAAINGVINTPELNCKGNGTAQSADLRIRRQHSSDSVSSINSATSHSSVGSNIESDSKKKKRKNWVNELRSSFKQAFGKKKSPKSASSHSDIEEMTDSSLPSSPKLPHNGSTGSTPLLRNSHSNSLISECMDSEAETVMQLRNELRDKEMKLTDIRLEALSSAHQLDQLREAMNRMQSEIEKLKAENDRLKSESQGSGCSRAPSQVSISASPRQSMGLSQHSLNLTESTSLDMLLDDTGECSARKEGGRHVKIVVSFQEEMKWKEDSRPHLFLIGCIGVSGKTKWDVLDGVVRRLFKEYIIHVDPVSQLGLNSDSVLGYSIGEIKRSNTSETPELLPCGYLVGENTTISVTVKGLAENSLDSLVFESLIPKPILQRYVSLLIEHRRIILSGPSGTGKTYLANRLSEYIVLREGRELTDGVIATFNVDHKSSKELRQYLSNLADQCNSENNAVDMPLVIILDNLHHVSSLGEIFNGLLNCKYHKCPYIIGTMNQATSSTPNLQLHHNFRWVLCANHTEPVKGFLGRFLRRKLMETEISGRVRNMELVKIIDWIPKVWHHLNRFLEAHSSSDVTIGPRLFLSCPIDVDGSRVWFTDLWNYSIIPYLLEAVREGLQLYGRRAPWEDPAKWVMDTYPWAASPQQHEWPPLLQLRPEDVGFDGYSMPREGSTSKQMPPSDAEGDPLMNMLMRLQEAANYSSPQSYDSDSNSNSHHDDILDSSLESTL

SEQ ID NO: 748 - protein, 1417 aa, Homo sapiens
MAAVPQNNLQEQLERHSARTLNNKLSLSKPKFSGFTFKKKTSSDNNVSVTNVSVAKTPVLRNKDVNVTEDFSFSEPLPNTTNQQRVKDFFKNAPAGQETQRGGSKSLLPDFLQTPKEVVCTTQNTPTVKKSRDTALKKLEFSSSPDSLSTINDWDDMDDFDTSETSKSFVTPPQSHFVRVSTAQKSKKGKRNFFKAQLYTTNTVKTDLPPPSSESEQIDLTEEQKDDSEWLSSDVICIDDGPIAEVHINEDAQESDSLKTHLEDERDNSEKKKNLEEAELHSTEKVPCIEFDDDDYDTDFVPPSPEEIISASSSSSKCLSTLKDLDTSDRKEDVLSTSKDLLSKPEKMSMQELNPETSTDCDARQISLQQQLIHVMEHICKLIDTIPDDKLKLLDCGNELLQQRNIRRKLLTEVDFNKSDASLLGSLWRYRPDSLDGPMEGDSCPTGNSMKELNFSHLPSNSVSPGDCLLTTTLGKTGFSATRKNLFERPLFNTHLQKSFVSSNWAETPRLGKKNESSYFPGNVLTSTAVKDQNKHTASINDLERETQPSYDIDNFDIDDFDDDDDWEDIMHNLAASKSSTAAYQPIKEGRPIKSVSERLSSAKTDCLPVSSTAQNINFSESIQNYTDKSAQNLASRNLKHERFQSLSFPHTKEMMKIFHKKFGLHNFRTNQLEAINAALLGEDCFILMPTGGGKSLCYQLPACVSPGVTVVISPLRSLIVDQVQKLTSLDIPATYLTGDKTDSEATNIYLQLSKKDPIIKLLYVTPEKICASNRLISTLENLYERKLLARFVIDEAHCVSQWGHDFRQDYKRMNMLRQKFPSVPVMALTATANPRVQKDILTQLKILRPQVFSMSFNRHNLKYYVLPKKPKKVAFDCLEWIRKHHPYDSGIIYCLSRRECDTMADTLQRDGLAALAYHAGLSDSARDEVQQKWINQDGCQVICATIAFGMGIDKPDVRFVIHASLPKSVEGYYQESGRAGRDGEISHCLLFYTYHDVTRLKRLIMMEKDGNHHTRETHFNNLYSMVHYCENITECRRIQLLAYFGENGFNPDFCKKHPDVSCDNCCKTKDYKTRDVTDDVKSIVRFVQEHSSSQGMRNIKHVGPSGRFTMNMLVDIFLGSKSAKIQSGIFGKGSAYSRHNAERLFKKLILDKILDEDLYINANDQAIAYVMLGNKAQTVLNGNLKVDFMETENSSSVKKQKALVAKVSQREEMVKKCLGELTEVCKSLGKVFGVHYFNIFNTVTLKKLAESLSSDPEVLLQIDGVTEDKLEKYGAEVISVLQKYSEWTSPAEDSSPGISLSSSRGPGRSAAEELDEEIPVSSHYFASKTRNERKRKKMPASQRSKRRKTASSGSKAKGGSATCRKISSKTKSSSIIGSSSASHTSQATSGANSKLGIMAPPKPINRPFLKPSYAFS

SEQ ID NO: 749 - protein, 1730 aa, Homo sapiens
MNVQPCSRCGYGVYPAEKISCIDQIWHKACFHCEVCKMMLSVNNFVSHQKKPYCHAHNPKNNTFTSVYHTPLNLNVRTFPEAISGIHDQEDGEQCKSVFHWDMKSKDKEGAPNRQPLANERAYWTGYGEGNAWCPGALPDPEIVRMVEARKSLGEEYTEDYEQPRGKGSFPAMITPAYQRAKKANQLASQVEYKRGHDERISRFSTVVDTPELLRSKAGAQLQSDVRYTEDYEQQRGKGSFPAMITPAYQIAKRANELASDVRYHQQYQKEMRGMAGPAIGAEGILTRECADQYGQGYPEEYEEHRGKGSFPAMITPAYQNAKKAHELASDIKYRQDFNKMKGAAHYHSLPAQDNLVLKQAQSVNKLVSEVEYKKDLESSRGHSINYCETPQFRNVSKISKFTSDNKYKENYQNHMRGRYEGVGMDRRTLHAMKVGSLASNVAYKADYKHDIVDYNYPATLTPSYQTAMKLVPLKDANYRQSIDKLKYSSVTDTPQIVQAKINAQQLSHVNYRADYEKNKLNYTLPQDVPQLVKAKTNAKLFSEVKYKEGWEKTKGKGFEMKLDAMSLLAAKASGELASNIKYKEEYEKTKGKAMGTADSRLLHSLQIAKMSSEVEYKKGFEESKTRFHLPMDMVNIRHAKKAQTLASDLDYRKKLHEYTVLPEDMKTQWAKKAYGLQSELQYKADLAWMKGVGWLTEGSLNLEQAKKAGQLVSEKNYRQRVDELKFTSVTDSSQMEHAKKSQELQSGVAYKAGNEQSVHQYTISKDEPLFLQARANAANLSEKLYKSSWENQKAKGFELRLDSLTFLAAKAKRDLASEVKYKEDYERSRGKLIGAKDVQGDSQMSHSLQMSKLQSELEYKKGFEDTKSQCHVSLDMVHLVHARKAQHLATDVGYKTAEHHFTALPTDMKVEWAKKAYGLQSDNQYRADVKWMKGMGWVATGSLNVEQAKKAGELISEKKYRQHPDALKFTSIKDTPEMVQARISYTQAVDRLYREQGENIKHHYTPTADLPEVLLAKLNAMNISETRYKESWSKLRDGGYKLRLDALPFQAAKASGEIISDYKYKEAFEKMKGQMLGSRSLEDDISLAHSVYATSLQSDVNYKKGFEHSKAQFHLPLDMAALVHAKKAQTLASNQDYKHPLPQYTSLAEDLRLSCAKKAHKLQSENLYRSDLNFMRGVACVIPGTLEIEGRKKASELISESKYRQHPHSFKYTAVTDTPNLLHAKFSNQITNERLYKAAGEDARHEYTMTLGLPEFIRAKTNAANLSDARYKESWRNLRAQGYKLTIEALPFQAARASGDIASDFLYRHDFVKERGKLIGPQSVRDDPRIQHCRRMGQLQSELQYRRGATSSQAQFHLPMDMVHLVHAKNAQALASDHDYRTQYHKFTALPEDLKMAWAKKAHALQSELRYKSDLIGMKGIGWLALRSPQMESAKKAGELISETKYRKKPDSIKFTTVVDSPDLVHAKNSYMHCNERMYRSGDAESLHRYTLIPDHPDFTRARLNALHLSDKVYRNSWEQTRAGSYDFRLDAIPFQTARASREIASDFRYKEAFLRDRGLQIGYRSVDDDPRMKHFLNVGRLQSDNEYKKDFAKSRSQFHSSTDQPGLLQAKRSQQLASDVHYRQPLPQPTCDPEQLGLRHAQKAHQLQSDVKYKSDLNLTRGVGWTPPGSYKVEMARRAAELANARGLGLQGAYRGAEAVEAGDHQSGEVNPDATEILHVKKKKALLL

SEQ ID NO: 750 - protein, 147 aa, Homo sapiens
MVHLTPEEKSAVTALWGKVNVDEVGGEALGRLLVVYPWTQRFFESFGDLSTPDAVMGNPKVKAHGKKVLGAFSDGLAHLDNLKGTFATLSELHCDKLHVDPENFRLLGNVLVCVLAHHFGKEFTPPVQAAYQKVVAGVANALAHKYH

SEQ ID NO: 751 - protein, 2443 aa, Homo sapiens
MAAEEGVASAASAGGSWGTAAMGRVLPMLLVPVPAEAMGQLGSRAQLRTQPEALGSLTAAGSLQVLSLTPGSRGGGRCCLEGPFWHFLWEDSRNSSTPTEKPKLLALGENYELLIYEFNLKDGRCDATILYSCSREALQKLIDDQDISISLLSLRILSFHNNTSLLFINKCVILHIIFPERDAAIRVLNCFTLPLPAQAVDMIIDTQLCRGILFVLSSLGWIYIFDVVDGTYVAHVDLALHKEDMCNEQQQEPAKISSFTSLKVSQDLDVAVIVSSSNSAVALNLNLYFRQHPGHLLCERILEDLPIQGPKGVDEDDPVNSAYNMKLAKFSFQIDRSWKAQLSSLNETIKNSKLEVSCCAPWFQDILHLESPESGNHSTSVQSWAFIPQDIMHGQYNVLQKDHAKTSDPGRSWKIMHISEQEEPIELKCVSVTGFTALFTWEVERMGYTITLWDLETQGMQCFSLGTKCIPVDSSGDQQLCFVLTENGLSLILFGLTQEEFLNRLMIHGSASTVDTLCHLNGWGRCSIPIHALEAGIENRQLDTVNFFLKSKENLFNPSSKSSVSDQFDHLSSHLYLRNVEELIPALDLLCSAIRESYSEPQSKHFSEQLLNLTLSFLNNQIKELFIHTEELDEHLQKGVNILTSYINELRTFMIKFPWKLTDAIDEYDVHENVPKVKESNIWKKLSFEEVIASAILNNKIPEAQTFFRIDSHSAQKLEELIGIGLNLVFDNLKKNNIKEASELLKNMGFDVKGQLLKICFYTTNKNIRDFLVEILKEKNYFSEKEKRTIDFVHQVEKLYLGHFQENMQIQSFPRYWIKEQDFFKHKSVLDSFLKYDCKDEFNKQDHRIVLNWALWWDQLTQESILLPRISPEEYKSYSPEALWRYLTARHDWLNIILWIGEFQTQHSYASLQQNKWPLLTVDVINQNTSCNNYMRNEILDKLARNGVFLASELEDFECFLLRLSRIGGVIQDTLPVQNYKTKEGWDFHSQFILYCLEHSLQHLLYVYLDCYKLSPENCPFLEKKELHEAHPWFEFLVQCRQVASNLTDPKLIFQASLANAQILIPTNQASVSSMLLEGHTLLALATTMYSPGGVSQVVQNEENENCLKKVDPQLLKMALTPYPKLKTALFPQCTPPSVLPSDITIYHLIQSLSPFDPSRLFGWQSANTLAIGDAWSHLPHFSSPDLVNKYAIVERLNFAYYLHNGRPSFAFGTFLVQELIKSKTPKQLIQQVGNEAYVIGLSSFHIPSIGAACVCFLELLGLDSLKLRVDMKVANIILSYKCRNEDAQYSFIRESVAEKLSKLADGEKTTTEELLVLLEEGTWNSIQQQEIKRLSSESSSQWALVVQFCRLHNMKLSISYLRECAKANDWLQFIIHSQLHNYHPAEVKSLIQYFSPVIQDHLRLAFENLPSVPTSKMDSDQVCNKCPQELQGSKQEMTDLFEILLQCSEEPDSWHWLLVEAVKQQAPILSVLASCLQGASAISCLCVWIITSVEDNVATEAMGHIQDSTEDHTWNLEDLSVIWRTLLTRQKSKTLIRGFQLFFKDSPLLLVMEMYELCMFFRNYKEAEAKLLEFQKSLETLNTAATKVHPVIPAMWLEDQVCFLLKLMLQQCKTQYELGKLLQLFVEREHLFSDGPDVKKLCILCQILKDTSIAINHTIITSYSIENLQHECRSILERLQTDGQFALARRVAELAELPVDNLVIKEITQEMQTLKHIEQWSLKQARIDFWKKCHENFKKNSISSKAASSFFSTQAHVACEHPTGWSSMEERHLLLTLAGHWLAQEDVVPLDKLEELEKQIWLCRITQHTLGRNQEETEPRFSRQISTSGELSFDSLASEFSFSKLAALNTSKYLELNSLPSKETCENRLDWKEQESLNFLIGRLLDDGCVHEASRVCRYFHFYNPDVALVLHCRALASGEASMEDLHPEIHALLQSAELLEEEAPDIPLRRVHSTSSLDSQKFVTVPSSNEVVTNLEVLTSKCLHGKNYCRQVLCLYDLAKELGCSYTDVAAQDGEAMLRKILASQQPDRCKRAQAFISTQGLKPDTVAELVAEEVTRELLTSSQGTGHKQMFNPTEESQTFLQLTTLCQDRTLVGMKLLDKISSVPHGELSCTTELLILAHHCFTLTCHMEGIIRVLQAAHMLTDNHLAPSEEYGLVVRLLTGIGRYNEMTYIFDLLHKKHYFEVLMRKKLDPSGTLKTALLDYIKRCRPGDSEKHNMIALCFSMCREIGENHEAAARIQLKLIESQPWEDSLKDGHQLKQLLLKALTLMLDAAESYAKDSCVRQAQHCQRLTKLITLQIHFLNTGQNTMLINLGRHKLMDCILALPRFYQASIVAEAYDFVPDWAEILYQQVILKGDFNYLEEFKQQRLLKSSIFEEISKKYKQHQPTDMVMENLKKLLTYCEDVYLYYKLAYEHKFYEIVNVLLKDPQTGCCLKDMLAG

SEQ ID NO: 752 - protein, 115 aa, Homo sapiens
EVQLVETGGGLIQPGGSLRLSCAASGFTVSBHSMSWVRQAPGKALZWVSAIYRGGTTYYADSVKGRFTISRDDSRBTVYLQMBSLRAEDTAVYYCARDLAAARLFGKGTTVTVSS

SEQ ID NO: 753 - protein, 1722 aa, Homo sapiens
MDDDDAKLKAEIEAELDKLSISSLEKEDIESDAKSETQSDDSDTDSVELPESVLHCINIIKNRSKAVEELILQDLEDTDILSCSYGAVSNNHMHLRTGLSTEYEESSEQLIKILSEIEKEEFMRSKTDCATPDFVPEPSPHDLPMDEHVLPDDADINFGYCEVEEKCRQSFEAWQEKQKELEDKEKQTLKAQRDREEKQFQEEEEKRHCWMKQFKVEKKKLENIQKQEQDKMNDELYKEEKIWKEKFKQHEEYIRNLHLQMEEERTRFKDQQEKEKNSLLKQQNNAAVKIQAKYKAFVAYQKYGPIIKEQIESKKRKAQEWKEKEAKIRQKEEENRKRLEEEQRIKEERKKQKEEERKRREKEYEEKKNIVKQEREQLISKEKIILREDASQQLIISSALKKSGYNNKHLSLEDISNDKGDIAKNLVDENSKKQEDVLLWLVEESNMKENVDRQTILKESIQVKLKESISSQTILADFKMEEKNENLAKKRCSEELVKQERKYENTDNKTELGNSDLKGNLKEQFPLQELKSDAQKEEKIMKHVINENTGQKTQIILGHNQEISEVKTNEEQKIIKDNQQKKIQKVEKEEIQEQNGLLYKDKDTLVISVKQRSLSLTSENSKDVRENVILQEKEIYSKSKEIEENPKDNAWNSGIVIFNTTDTMINIEGKRNDQDYVLGRHAPCEGLSNYNAESSMVSKEVNSLKSEIRNISEKCHENAPEPDSMTCCVSESTLLYSIEERRLAWIKSFKPWLEIFKQNQQKKIVRRKRPVKCPANMTPALDKLEILRCGPWDTLQQVTTVTFQDLPGCVLSTLAECTNLQFLSLRRCGLTSLHSLSNCKKLKYIDAQENHIEAIECENLENLCVVLLNKNQLTSLHGLDGCTNIQCLELSYNKITRIGYSFFLEEKLVDNAGFCHHLGTSTSYLSLAQVWIPTGLCWSWIPITSLTKNSDCNFLISHLYWNCGLESLKNLQQLILDHNQLINTKGLCDTPTIVYLDCSHNHLTDVEGVENCGLLQILKLQGNYLSELPSLENLVLLRELHLDDNSISTVEAFSSYWLPLLQNITISQNSLTKIVPLFHFVSLEKLDVSHNCLSDLKSAIKWFDACYSLHELSLTGNPLLQETNWRDSLLKVLPALRILNGNILNSNSESRTEEHNQLGSAGFLALCQSQIREFNLLIENYITGKGDVFTLDTAENLCHYFKKLMILSTEYRHAHERGDVTITKKDESEAQKNHLAPTNSDSTLQNGVFYSCAREGEPDSPDIPEKWMDSVSSHSPLSKSATCENMEGRHQEILVCQKREDSKASSIPTIRIPFKEVVMTNSLLRNHQNIEPSEKIMAAVVIQSYWRGYLMRRQTHFSTRLHTAATEGLPNSSIKNQTILKKGKRENIVNIRKQREKAAILIQAVWKGFILRKKLTTALEAIKNEESDEEYREIDLEDFIFDEAALEEEWLALDSTRFPSQTLLLSNQLHWPKIPGNLKWDDTSFNLPSNPAQAWLCNDKENLSSSEHTQFNSRSENKTSSWTPESKTSRKSLLKSEKEKKISEEWGFKDISTAQQMLKRAQKMKSKKLKKKIDSTVRLALFKNNENKVSLPKSPKMVQPRRDGYFEGIEEDPIHKDTTANEKLERNREYTYQWLHTQVGVHETTSSRNMKCNHFLPELDPDVLNGGRVQLVARLVSREDTDLDLFSMTNGSALSVNREKKNQAHRHSAGSSSKLWFPSKLI

SEQ ID NO: 754 - protein, 2240 aa, Homo sapiens
MEQTWTRDYFAEDDGEMVPRTSHTAAFLSDTKDRGPPVQSQIWRSGEKVPFVQTYSLRAFEKPPQVQTQALRDFEKHLNDLKKENFSLKLRIYFLEERMQQKYEASREDIYKRNIELKVEVESLKRELQDKKQHLDKTWADVENLNSQNEAELRRQFEERQQETEHVYELLENKIQLLQEESRLAKNEAARMAALVEAEKECNLELSEKLKGVTKNWEDVPGDQVKPDQYTEALAQRDKRIEELNQSLAAQERLVEQLSREKQQLLHLLEEPTSMEVQPMTEELLKQQKLNSHETTITQQSVSDSHLAELQEKIQQTEATNKILQEKLNEMSYELKCAQESSQKQDGTIQNLKETLKSRERETEELYQVIEGQNDTMAKLREMLHQSQLGQLHSSEGTSPAQQQVALLDLQSALFCSQLEIQKLQRVVRQKERQLADAKQCVQFVEAAAHESEQQKEASWKHNQELRKALQQLQEELQNKSQQLRAWEAEKYNEIRTQEQNIQHLNHSLSHKEQLLQEFRELLQYRDNSDKTLEANEMLLEKLRQRIHDKAVALERAIDEKFSALEEKEKELRQLRLAVRERDHDLERLRDVLSSNEATMQSMESLLRAKGLEVEQLSTTCQNLQWLKEEMETKFSRWQKEQESIIQQLQTSLHDRNKEVEDLSATLLCKLGPGQSEIAEELCQRLQRKERMLQDLLSDRNKQVLEHEMEIQGLLQSVSTREQESQAAAEKLVQALMERNSELQALRQYLGGRDSLMSQAPISNQQAEVTPTGCLGKQTDQGSMQIPSRDDSTSLTAKEDVSIPRSTLGDLDTVAGLEKELSNAKEELELMAKKERESQMELSALQSMMAVQEEELQVQAADMESLTRNIQIKEDLIKDLQMQLVDPEDIPAMERLTQEVLLLREKVASVESQGQEISGNRRQQLLLMLEGLVDERSRLNEALQAERQLYSSLVKFHAHPESSERDRTLQVELEGAQVLRSRLEEVLGRSLERLNRLETLAAIGGAAAGDDTEDTSTEFTDSIEEEAAHHSHQQLVKVALEKSLATVETQNPSFSPPSPMGGDSNRCLQEEMLHLRAEFHQHLEEKRKAEEELKELKAQIEEAGFSSVSHIRNTMLSLCLENAELKEQMGEAMSDGWEIEEDKEKGELDNQSQPRDPGPQSAFSLPGSTQHLRSQLSQCKQRYQDLQEKLLLSEATVFAQANELEKYRVMLTGESLVKQDSKQIQVDLQDLGYETCGRSENEAEREETTSPECEEHNSLKEMVLMEGLCSEQGRRGSTLASSSERKPLENQLGKQEEFRVYGKSENILVLRKDIKDLKAQLQNANKVIQNLKSRVRSLSVTSDYSSSLERPWKLRAVGTLEGSSPHSVPDEDEGWLSDGTGAFYSPGLQAKKDLESLIQRVSQLEAQLPKNGLEEKLAEELRSASWPGKYDSLIQDQARELSYLRQKIREGRGICYLITRHAKDTVKSFEDLLRSNDIDYYLGQSFREQLAQGSQLTERLTSKLSTKDHKSEKDQAGLEPLALRLSRELQEKEKVIEVLQAKLDARSLTPSSSHALSDSHRSPSSTSFLSDELEACSDMDIVSEYTHYEEKKASPSHSDSIHHSSHSAVLSSKPSSTSASQGAKAESNSNPISLPTPQNTPKEANQAHSGASTVPPASTATLLSNDLEADSSYYLNSAQPHSPPRGTIELGRILEPGYLGSSGKWDVMRPQKGSVSGDLSSGSSVYQLNSKPTGADLLEEHLGEIRNLRQRLEESICINDRLREQLEHRLTSTARGRGSTSNFYSQGLESIPQLCNENRVLREDNRRLQAQLSHVSREHSQETESLREALLSSRSHLQELEKELEHQKVERQQLLEDLREKQQEVLHFREERLSLQENDSRLQHKLVLLQQQCEEKQQLFESLQSELQIYEALYGNSKKGLKAYSLDACHQIPLSSDLSHLVAEVRALRGQLEQSIQGNNCLRLQLQQQLESGAGKASLSPSSINQNFPASTDPGNKQLLLQDSAVSPPVRDVGMNSPALVFPSSASSTPGSETPIINRANGLGLDTSPVMKTPPKLEGDATDGSFANKHGRHVIGHIDDYSALRQQIAEGKLLVKKIVSLVRSACSFPGLEAQGTEVLGSKGIHELRSSTSALHHALEESASLLTMFWRAALPSTHIPVLPGKVGESTERELLELRTKVSKQERLLQSTTEHLKNANQQKESMEQFIVSQLTRTHDVLKKARTNLEVKSLRALPCTPAL

SEQ ID NO: 755 - protein, 2363 aa, Homo sapiens
MAAVLQQVLERTELNKLPKSVQNKLEKFLADQQSEIDGLKGRHEKFKVESEQQYFEIEKRLSHSQERLVNETRECQSLRLELEKLNNQLKALTEKNKELEIAQDRNIAIQSQFTRTKEELEAEKRDLIRTNERLSQELEYLTEDVKRLNEKLKESNTTKGELQLKLDELQASDVSVKYREKRLEQEKELLHSQNTWLNTELKTKTDELLALGREKGNEILELKCNLENKKEEVSRLEEQMNGLKTSNEHLQKHVEDLLTKLKEAKEQQASMEEKFHNELNAHIKLSNLYKSAADDSEAKSNELTRAVEELHKLLKEAGEANKAIQDHLLEVEQSKDQMEKEMLEKIGRLEKELENANDLLSATKRKGAILSEEELAAMSPTAAAVAKIVKPGMKLTELYNAYVETQDQLLLEKLENKRINKYLDEIVKEVEAKAPILKRQREEYERAQKAVASLSVKLEQAMKEIQRLQEDTDKANKQSSVLERDNRRMEIQVKDLSQQIRVLLMELEEARGNHVIRDEEVSSADISSSSEVISQHLVSYRNIEELQQQNQRLLVALRELGETREREEQETTSSKITELQLKLESALTELEQLRKSRQHQMQLVDSIVRQRDMYRILLSQTTGVAIPLHASSLDDVSLASTPKRPSTSQTVSTPAPVPVIESTEAIEAKAALKQLQEIFENYKKEKAENEKIQNEQLEKLQEQVTDLRSQNTKISTQLDFASKRYEMLQDNVEGYRREITSLHERNQKLTATTQKQEQIINTMTQDLRGANEKLAVAEVRAENLKKEKEMLKLSEVRLSQQRESLLAEQRGQNLLLTNLQTIQGILERSETETKQRLSSQIEKLEHEISHLKKKLENEVEQRHTLTRNLDVQLLDTKRQLDTETNLHLNTKELLKNAQKEIATLKQHLSNMEVQVASQSSQRTGKGQPSNKEDVDDLVSQLRQTEEQVNDLKERLKTSTSNVEQYQAMVTSLEESLNKEKQVTEEVRKNIEVRLKESAEFQTQLEKKLMEVEKEKQELQDDKRRAIESMEQQLSELKKTLSSVQNEVQEALQRASTALSNEQQARRDCQEQAKIAVEAQNKYERELMLHAADVEALQAAKEQVSKMASVRQHLEETTQKAESQLLECKASWEERERMLKDEVSKCVCRCEDLEKQNRLLHDQIEKLSDKVVASVKEGVQGPLNVSLSEEGKSQEQILEILRFIRREKEIAETRFEVAQVESLRYRQRVELLERELQELQDSLNAEREKVQVTAKTMAQHEELMKKTETMNVVMETNKMLREEKERLEQDLQQMQAKVRKLELDILPLQEANAELSEKSGMLQAEKKLLEEDVKRWKARNQHLVSQQKDPDTEEYRKLLSEKEVHTKRIQQLTEEIGRLKAEIARSNASLTNNQNLIQSLKEDLNKVRTEKETIQKDLDAKIIDIQEKVKTITQVKKIGRRYKTQYEELKAQQDKVMETSAQSSGDHQEQHVSVQEMQELKETLNQAETKSKSLESQVENLQKTLSEKETEARNLQEQTVQLQSELSRLRQDLQDRTTQEEQLRQQITEKEEKTRKAIVAAKSKIAHLAGVKDQLTKENEELKQRNGALDQQKDELDVRITALKSQYEGRISRLERELREHQERHLEQRDEPQEPSNKVPEQQRQITLKTTPASGERGIASTSDPPTANIKPTPVVSTPSKVTAAAMAGNKSTPRASIRPMVTPATVTNPTTTPTATVMPTTQVESQEAMQSEGPVEHVPVFGSTSGSVRSTSPNVQPSISQPILTVQQQTQATAFVQPTQQSHPQIEPANQELSSNIVEVVQSSPVERPSTSTAVFGTVSATPSSSLPKRTREEEEDSTIEASDQVSDDTVEMPLPKKLKSVTPVGTEEEVMAEESTDGEVETQVYNQDSQDSIGEGVTQGDYTPMEDSEETSQSLQIDLGPLQSDQQTTTSSQDGQGKGDDVIVIDSDDEEEDDDENDGEHEDYEEDEEDDDDDEDDTGMGDEGEDSNEGTGSADGNDGYEADDAEGGDGTDPGTETEESMGGGEGNHRAADSQNSGEGNTGAAESSFSQEVSREQQPSSASERQAPRAPQSPRRPPHPLPPRLTIHAPPQELGPPVQRIQMTRRQSVGRGLQLTPGIGGMQQHFFDDEDRTVPSTPTLVVPHRTDGFAEAIHSPQVAGVPRFRFGPPEDMPQTSSSHSDLGQLASQGGLGMYETPLFLAHEEESGGRSVPTTPLQVAAPVTVFTESTTSDASEHASQSVPMVTTSTGTLSTTNETATGDDGDEVFVEAESEGISSEAGLEIDSQQEEEPVQASDESDLPSTSQDPPSSSSVDTSSSQPKPFRRVRLQTTLRQGVRGRQFNRQRGVSHAMGGRGGINRGNIN

SEQ ID NO: 756 - protein, 1200 aa, Homo sapiens
MDPPSLDTAIQHALAGLYPPFEATAPTVLGQVFRLLDSGFQGDGLSFLLDFLIPAKRLCEQVREAACAPYSHCLFLHEGWPLCLRDEVVVHLAPLNPLLLRQGDFYLQVEPQEEQSVCIMIKCLSLDLCTVDKKPVPEPAYPILFTQEWLEAINSDFEGNPLHNCLVASENGIAPVPWTKITSPEFVDDRPQVVNALCQAWGPLPLEALDLSSPQELHQASSPDNQVLPAQSLAKGKGRTYGSKYPGLIKVEQARCGEVAFRMDEVVSQDFEGDYVALLGFSQESRGESPSREAGTSSGCTSGALEEIAGTKETPLFQKILPLSEANEGPSLGNRACTKPESSEERPYNLGFRRKVNLKAPTHNSERPPQGSYMNVLEDALDCASGLRAGVSQEPAASKMQGPLGNPENMVQLRPGPRQASSPRLSPASPAAAASETKIEVKTKERNGRLPKPMPCPSRNTSSPEPPTPGLKFSFLRGQRQPSVTPEKASLQHNGPWKVLCSLYSPKPNRAKSLGKAGTTQTKTSGPATAPSPLTEEKAALPEASAGSPERGPTLEEEPPGPEPRIGALGVKVFRSRIACLPGGRDRAGRPLLLVSTTEGAWEAPWCTVSEVTKLLSYLCTIPRPEDKAKGLAVLIDARRQPPQPGLVSALQATQAQVPASIRAILFLGEKEAALQLQTLPDVQVEVLTSLKALSHHVDPSQLPAVLEGPFPYCHTEWVHFFQKLDPFLADLHQASSLLQASIEEFEKADPPGGMQEATRCLSKSKELMEAVLRDPGLLGLQREGGATLARLQHDASRLDFSPDVRSHLAAATALYSLVDEQLHVLVTASNSLLGKLELRVRLGRLEAAIHQVSDWMEQEGRRCLQSLTPKDGSLETVEKAHAEFENFFLQAAAQYRRGLELSKQAAQLGATARGAGEAERAEFPELAAFASTQRAFQAELTHFYMAAERQRTDLETLLHLHRFCKRMTWFHMDCQDLMAQLRLDKTSRVSPGDQRRLHRYLQRLASEFPAEKLAAVGLQVASLSRAGLGQELWEEARIRHEEIRMLLEKALTHSSCPEAPAAHSARPERRGVAAKGQGVSVEVTSKGRWDQPPLDSLGMDHLPKSYWPPGPPRGEQNRTFQAGSPPQEAGQAAEAEDGKGSHKLPDPAREHLLATTFFRQQPPRQSQVPRLTGGSFSSEGTDSQTSLEDSPQTSPLASL

SEQ ID NO: 757 - protein, 1719 aa, Homo sapiens
MPYSVGFREADAATSFLRAARSGNLDKALDHLRNGVDINTCNQNGLNGLHLASKEGHVKMVVELLHKEIILETTTKKGNTALHIAALAGQDEVVRELVNYGANVNAQSQKGFTPLYMAAQENHLEVVKFLLENGANQNVATEDGFTPLAVALQQGHENVVAHLINYGTKGKVRLPALHIAARNDDTRTAAVLLQNDPNPDVLSKTGFTPLHIAAHYENLNVAQLLLNRGASVNFTPQNGITPLHIASRRGNVIMVRLLLDRGAQIETKTKDELTPLHCAARNGHVRISEILLDHGAPIQAKTKNGLSPIHMAAQGDHLDCVRLLLQYDAEIDDITLDHLTPLHVAAHCGHHRVAKVLLDKGAKPNSRALNGFTPLHIACKKNHVRVMELLLKTGASIDAVTESGLTPLHVASFMGHLPIVKNLLQRGASPNVSNVKVETPLHMAARAGHTEVAKYLLQNKAKVNAKAKDDQTPLHCAARIGHTNMVKLLLENNANPNLATTAGHTPLHIAAREGHVETVLALLEKEASQACMTKKGFTPLHVAAKYGKVRVAELLLERDAHPNAAGKNGLTPLHVAVHHNNLDIVKLLLPRGGSPHSPAWNGYTPLHIAAKQNQVEVARSLLQYGGSANAESVQGVTPLHLAAQEGHAEMVALLLSKQANGNLGNKSGLTPLHLVAQEGHVPVADVLIKHGVMVDATTRMGYTPLHVASHYGNIKLVKFLLQHQADVNAKTKLGYSPLHQAAQQGHTDIVTLLLKNGASPNEVSSDGTTPLAIAKRLGYISVTDVLKVVTDETSFVLVSDKHRMSFPETVDEILDVSEDEGEELISFKAERRDSRDVDEEKELLDFVPKLDQVVESPAIPRIPCAMPETVVIRSEEQEQASKEYDEDSLIPSSPATETSDNISPVASPVHTGFLVSFMVDARGGSMRGSRHNGLRVVIPPRTCAAPTRITCRLVKPQKLSTPPPLAEEEGLASRIIALGPTGAQFLSPVIVEIPHFASHGRGDRELVVLRSENGSVWKEHRSRYGESYLDQILNGMDEELGSLEELEKKRVCRIITTDFPLYFVIMSRLCQDYDTIGPEGGSLKSKLVPLVQATFPENAVTKRVKLALQAQPVPDELVTKLLGNQATFSPIVTVEPRRRKFHRPIGLRIPLPPSWTDNPRDSGEGDTTSLRLLCSVIGGTDQAQWEDITGTTKLVYANECANFTTNVSARFWLSDCPRTAEAVNFATLLYKELTAVPYMAKFVIFAKMNDPREGRLRCYCMTDDKVDKTLEQHENFVEVARSRDIEVLEGMSLFAELSGNLVPVKKAAQQRSFHFQSFRENRLAMPVKVRDSSREPGGSLSFLRKAMKYEDTQHILCHLNITMPPCAKGSGAEDRRRTPTPLALRYSILSESTPGSLSGTEQAEMKMAVISEHLGLSWAELARELQFSVEDINRIRVENPNSLLEQSVALLNLWVIREGQNANMENLYTALQSIDRGEIVNMLEGSGRQSRNLKPDRRHTDRDYSLSPSQMNGHQRGQARITHSPTVSQVTERSQDRLQDWDADGSIVSYLQDAAQGSWQEEVTQGPHSFQGTSTMTEGLEPGGSQEYEKVLVSVSEHTWTEQPEAESSQADRDRRQQGQEEQVQEAKNTFTQVVQGNEFQNIPGEQVTEEQFTDEQGNIVTKKIIRKVVRQIDLSSADAAQEHEEVTVEGPLEDPSELEVDIDYFMKHSKDHTSTPNP

SEQ ID NO: 758 - protein, 866 aa, Homo sapiens
MFSMRIVCLVLSVVGTAWTADSGEGDFLAEGGGVRGPRVVERHQSACKDSDWPFCSDEDWNYKCPSGCRMKGLIDEVNQDFTNRINKLKNSLFEYQKNNKDSHSLTTNIMEILRGDFSSANNRDNTYNRVSEDLRSRIEVLKRKVIEKVQHIQLLQKNVRAQLVDMKRLEVDIDIKIRSCRGSCSRALAREVDLKDYEDQQKQLEQVIAKDLLPSRDRQHLPLIKMKPVPDLVPGNFKSQLQKVPPEWKALTDMPQMRMELERPGGNEITRGGSTSYGTGSETESPRNPSSAGSWNSGSSGPGSTGNRNPGSSGTGGTATWKPGSSGPGSTGSWNSGSSGTGSTGNQNPGSPRPGSTGTWNPGSSERGSAGHWTSESSVSGSTGQWHSESGSFRPDSPGSGNARPNNPDWGTFEEVSGNVSPGTRREYHTEKLVTSKGDKELRTGKEKVTSGSTTTTRRSCSKTVTKTVIGPDGHKEVTKEVVTSEDGSDCPEAMDLGTLSGIGTLDGFRHRHPDEAAFFDTASTGKTFPGFFSPMLGEFVSETESRGSESGIFTNTKESSSHHPGIAEFPSRGKSSSYSKQFTSSTSYNRGDSTFESKSYKMADEAGSEADHEGTHSTKRGHAKSRPVRDCDDVLQTHPSGTQSGIFNIKLPGSSKIFSVYCDQETSLGGWLLIQQRMDGSLNFNRTWQDYKRGFGSLNDEGEGEFWLGNDYLHLLTQRGSVLRVELEDWAGNEAYAEYHFRVGSEAEGYALQVSSYEGTAGDALIEGSVEEGAEYTSHNNMQFSTFDRDADQWEENCAEVYGGGWWYNNCQAANLNGIYYPGGSYDPRNNSPYEIENGVVWVSFRGADYSLRAVRMKIRPLVTQ

SEQ ID NO: 759 - protein, 114 aa, Homo sapiens
MTCKMSQLERNIETIINTFHQYSVKLGHPDTLNQGEFKELVRKDLQNFLKKENKNEKVIEHIMEDLDTNADKQLSFEEFIMLMARLTWASHEKMHEGDEGPGHHHKPGLGEGTP

SEQ ID NO: 760 - protein, 1623 aa, Homo sapiens
MAGQGDCCVKVAVRIRPQLSKEKIEGCHICTSVTPGEPQVLLGKDKAFTYDFVFDLDTWQEQIYSTCVSKLIEGCFEGYNATVLAYGQTGAGKTYTMGTGFDMATSEEEQGIIPRAIAHLFGGIAERKRRAQEQGVAGPEFKVSAQFLELYNEEILDLFDSTRDPDTRHRRSNIKIHEDANGGIYTTGVTSRLIHSQEELIQCLKQGALSRTTASTQMNVQSSRSHAIFTIHLCQMRMCTQPDLVNEAVTGLPDGTPPSSEYETLTAKFHFVDLAGSERLKRTGATGERAKEGISINCGLLALGNVISALGDQSKKVVHVPYRDSKLTRLLQDSLGGNSQTIMIACVSPSDRDFMETLNTLKYANRARNIKNKVVVNQDKTSQQISALRAEIARLQMELMEYKAGKRVIGEDGAEGYSDLFRENAMLQKENGALRLRVKAMQEAIDAINNRVTQLMSQEANLLLAKAGDGNEAIGALIQNYIREIEELRTKLLESEAMNESLRRSLSRASARSPYSLGASPAAPAFGGSPASSMEDASEVIRRAKQDLERLKKKEVRQRRKSPEKEAFKKRAKLQQENSEETDENEAEEEEEERDESGCEEEEGREDEDEDSGSEESLVDSDSDPEEKEVNFQADLADLTCEIEIKQKLIDELENSQRRLQTLKHQYEEKLILLQNKIRDTQLERDRVLQNLSTMECYTEEKANKIKADYEKRLREMNRDLQKLQAAQKEHARLLKNQSRYERELKKLQAEVAEMKKAKVALMKQMREEQQRRRLVETKRNREIAQLKKEQRRQEFQIRALESQKRQQEMVLRRKTQEVSALRRLAKPMSERVAGRAGLKPPMLDSGAEVSASTTSSEAESGARSVSSIVRQWNRKINHFLGDHPAPTVNGTRPARKKFQKKGASQSFSKAARLKWQSLERRIIDIVMQRMTIVNLEADMERLIKKREELFLLQEALRRKRERLQAESPEEEKGLQELAEEIEVLAANIDYINDGITDCQATIVQLEETKEELDSTDTSVVISSCSLAEARLLLDNFLKASIDKGLQVAQKEAQIRLLEGRLRQTDMAGSSQNHLLLDALREKAEAHPELQALIYNVQQENGYASTDEEISEFSEGSFSQSFTMKGSTSHDDFKFKSEPKLSAQMKAVSAECLGPPLDISTKNITKSLASLVEIKEDGVGFSVRDPYYRDRVSRTVSLPTRGSTFPRQSRATETSPLTRRKSYDRGQPIRSTDVGFTPPSSPPTRPRNDRNVFSRLTSNQSQGSALDKSDDSDSSLSEVLRGIISPVGGAKGARTAPLQCVSMAEGHTKPILCLDATDELLFTGSKDRSCKMWNLVTGQEIAALKGHPNNVVSIKYCSHSGLVFSVSTSYIKVWDIRDSAKCIRTLTSSGQVISGDACAATSTRAITSAQGEHQINQIALSPSGTMLYAASGNAVRIWELSRFQPVGKLTGHIGPVMCLTVTQTASQHDLVVTGSKDHYVKMFELGECVTGTIGPTHNFEPPHYDGIECLAIQGDILFSGSRDNGIKKWDLDQQELIQQIPNAHKDWVCALAFIPGRPMLLSACRAGVIKVWNVDNFTPIGEIKGHDSPINAICTNAKHIFTASSDLTVKFWSVRRLPHSGPP

SEQ ID NO: 761 - protein, 2476 aa, Homo sapiens
MNTEELELLSDSKYRNYVAAIDKALKNFEYSSEWADLISALGKLNKVLQNNAKYQVVPKKLTIGKRLAQCLHPALPGGVHRKALETYEIIFKIIGPKRLAKDLFLYSSGLFPLLANAAMSVKPTLLSLYEIYYLPLGKTLKPGLQGLLTGILPGLEEGSEYYERTNMLLEKVAAAVDQSAFYSALWGSLLTSPAVRLPGITYVLAHLNRKLSMEDQLYIIGSDIELMVEAVSTSVQDSSVLVQRSTLDLILFCFPFHMSQATRPDMIRILSAALHVVLRRDMSLNRRLYAWLLGPRSTRHSNPEEHATYYFTTFSKELLVQAMVGILQVNGFGEENTLMQDLKPFRILISLLDKPELGPVILEDVLIEVFRTLYSQCKAELDLQTEPPFSKDHAQLSSKLRENKKTAELIKTANLLFNSFEPYYMWDYVARWFEECCRRTLHVRLQIGPGDSNDSSELQLTNFCLLVDFLLDIVSLPTRSMRVLCQETYIEIQTEHLPQLLLRMISALTSHLQTLHLSELTDSLRLCSKILSKVQPPLLSASTGGVLQFPSGQNNSVKEWEDKKVSSVSHENPTEVFEDGENPPSSRSSESGFTEFIQYQADRTDDIDRELSEGQGAAAIPIGSTSSETETASTVGSEETIIQTPSVVTQGTATRSRKTAQKTAMQCCLEYVQQFLTRLINLYIIQNNSFSQSLATEHQGDLGREQGETSKWDRNSQGDVKEKNISKQKTSKEYLSAFLAACQLFLECSSFPVYIAEGNHTSELRSEKLETDCEHVQPPQWLQTLMNACSQASDFSVQSVAISLVMDLVGLTQSVAMVTGENINSVEPAQPLSPNQGRVAVVIRPPLTQGNLRYIAEKTEFFKHVALTLWDQLGDGTPQHHQKSVELFYQLHNLVPSSSICEDVISQQLTHKDKKIRMEAHAKFAVLWHLTRDLHINKSSSFVRSFDRSLFIMLDSLNSLDGSTSSVGQAWLNQVLQRHDIARVLEPLLLLLLHPKTQRVSVQRVQAERYWNKSPCYPGEESDKHFMQNFACSNVSQVQLITSKGNGEKPLTMDEIENFSLTVNPLSDRLSLLSTSSETIPMVVSDFDLPDQQIEILQSSDSGCSQSSAGDNLSYEVDPETVNAQEDSQMPKESSPDDDVQQVVFDLICKVVSGLEVESASVTSQLEIEAMPPKCSDIDPDEETIKIEDDSIQQSQNALLSNESSQFLSVSAEGGHECVANGISRNSSSPCISGTTHTLHDSSVASIETKSRQRSHSSIQFSFKEKLSEKVSEKETIVKESGKQPGAKPKVKLARKKDDDKKKSSNEKLKQTSVFFSDGLDLENWYSCGEGDISEIESDMGSPGSRKSPNFNIHPLYQHVLLYLQLYDSSRTLYAFSAIKAILKTNPIAFVNAISTTSVNNAYTPQLSLLQNLLARHRISVMGKDFYSHIPVDSNHNFRSSMYIEILISLCLYYMRSHYPTHVKVTAQDLIGNRNMQMMSIEILTLLFTELAKVIESSAKGFPSFISDMLSKCKVQKVILHCLLSSIFSAQKWHSEKMAGKNLVAVEEGFSEDSLINFSEDEFDNGSTLQSQLLKVLQRLIVLEHRVMTIPEENETGFDFVVSDLEHISPHQPMTSLQYLHAQPITCQGMFLCAVIRALHQHCACKMHPQWIGLITSTLPYMGKVLQRVVVSVTLQLCRNLDNLIQQYKYETGLSDSRPLWMASIIPPDMILTLLEGITAIIHYCLLDPTTQYHQLLVSVDQKHLFEARSGILSILHMIMSSVTLLWSILHQADSSEKMTIAASASLTTINLGATKNLRQQILELLGPISMNHGVHFMAAIAFVWNERRQNKTTTRTKVIPAASEEQLLLVELVRSISVMRAETVIQTVKEVLKQPPAIAKDKKHLSLEVCMLQFFYAYIQRIPVPNLVDSWASLLILLKDSIQLSLPAPGQFLILGVLNEFIMKNPSLENKKDQRDLQDVTHKIVDAIGAIAGSSLEQTTWLRRNLEVKPSPKIMVDGTNLESDVEDMLSPAMETANITPSVYSVHALTLLSEVLAHLLDMVFYSDEKERVIPLLVNIMHYVVPYLRNHSAHNAPSYRACVQLLSSLSGYQYTRRAWKKEAFDLFMDPSFFQMDASCVNHWRAIMDNLMTHDKTTFRDLMTRVAVAQSSSLNLFANRDVELEQRAMLLKRLAFAIFSSEIDQYQKYLPDIQERLVESLRLPQVPTLHSQVFLFFRVLLLRMSPQHLTSLWPTMITELVQVFLLMEQELTADEDISRTSGPSVAGLETTYTGGNGFSTSYNSQRWLNLYLSACKFLDLALALPSENLPQFQMYRWAFIPEASDDSGLEVRRQGIHQREFKPYVVRLAKLLRKRAKDKEEDFKTVILEGLEMAKHQKNPEEDNSGRTLGWEPGHLLLTICTVRSMEQLLPFFNVLSQVFNSKVTSRCGGHSGSPILYSNAFPNKDMKLENHKPCSSKARQKIEEMVEKDFLEGMIKT

SEQ ID NO: 762 - protein, 2036 aa, Homo sapiens
MAAVTMSVPGRKAPPRPGPVPEAAQPFLFTPRGPSAGGGPGSGTSPQVEWTARRLVWVPSELHGFEAAALRDEGEEEAEVELAESGRRLRLPRDQIQRMNPPKFSKAEDMAELTCLNEASVLHNLRERYYSGLIYTYSGLFCVVINPYKQLPIYTEAIVEMYRGKKRHEVPPHVYAVTEGAYRSMLQDREDQSILCTGESGAGKTENTKKVIQYLAHVASSPKGRKEPGVPASVSTVSYGELERQLLQANPILEAFGNAKTVKNDNSSRFGKFIRINFDVAGYIVGANIETYLLEKSRAIRQAKDECSFHIFYQLLGGAGEQLKADLLLEPCSHYRFLTNGPSSSPGQERELFQETLESLRVLGFSHEEIISMLRMVSAVLQFGNIALKRERNTDQATMPDNTAAQKLCRLLGLGVTDFSRALLTPRIKVGRDYVQKAQTKEQADFALEALAKATYERLFRWLVLRLNRALDRSPRQGASFLGILDIAGFEIFQLNSFEQLCINYTNEKLQQLFNHTMFVLEQEEYQREGIPWTFLDFGLDLQPCIDLIERPANPPGLLALLDEECWFPKATDKSFVEKVAQEQGGHPKFQRPRHLRDQADFSVLHYAGKVDYKANEWLMKNMDPLNDNVAALLHQSTDRLTAEIWKDEHGGFQQFSFLGSFPPSPPGSAERCSSAISPPGVEGIVGLEQVSSLGDGPPGGRPRRGMFRTVGQLYKESLSRLMATLSNTNPSFVRCIVPNHEKRAGKLEPRLVLDQLRCNGVLEGIRICRQGFPNRILFQEFRQRYEILTPNAIPKGFMDGKQACEKMIQALELDPNLYRVGQSKIFFRAGVLAQLEEERDLKVTDIIVSFQAAARGYLARRAFQKRQQQQSALRVMQRNCAAYLKLRHWQWWRLFTKVKPLLQVTRQDEVLQARAQELQKVQELQQQSAREVGELQGRVAQLEEERARLAEQLRAEAELCAEAEETRGRLAARKQELELVVSELEARVGEEEECSRQMQTEKKRLQQHIQELEAHLEAEEGARQKLQLEKVTTEAKMKKFEEDLLLLEDQNSKLSKERKLLEDRLAEFSSQAAEEEEKVKSLNKLRLKYEATIADMEDRLRKEEKGRQELEKLKRRLDGESSELQEQMVEQQQRAEELRAQLGRKEEELQAALARAEDEGGARAQLLKSLREAQAALAEAQEDLESERVARTKAEKQRRDLGEELEALRGELEDTLDSTNAQQELRSKREQEVTELKKTLEEETRIHEAAVQELRQRHGQALGELAEQLEQARRGKGAWEKTRLALEAEVSELRAELSSLQTARQEGEQRRRRLELQLQEVQGRAGDGERARAEAAEKLQRAQAELENVSGALNEAESKTIRLSKELSSTEAQLHDAQELLQEETRAKLALGSRVRAMEAEAAGLREQLEEEAAARERAGRELQTAQAQLSEWRRRQEEEAGALEAGEEARRRAAREAEALTQRLAEKTETVDRLERGRRRLQQELDDATMDLEQQRQLVSTLEKKQRKFDQLLAEEKAAVLRAVEERERAEAEGREREARALSLTRALEEEQEAREELERQNRALRAELEALLSSKDDVGKSVHELERACRVAEQAANDLRAQVTELEDELTAAEDAKLRLEVTVQALKTQHERDLQGRDEAGEERRRQLAKQLRDAEVERDEERKQRTLAVAARKKLEGELEELKAQMASAGQGKEEAVKQLRKMQAQMKELWREVEETRTSREEIFSQNRESEKRLKGLEAEVLRLQEELAASDRARRQAQQDRDEMADEVANGNLSKAAILEEKRQLEGRLGQLEEELEEEQSNSELLNDRYRKLLLQVESLTTELSAERSFSAKAESGRQQLERQIQELRGRLGEEDAGARARHKMTIAALESKLAQAEEQLEQETRERILSGKLVRRAEKRLKEVVLQVEEERRVADQLRDQLEKGNLRVKQLKRQLEEAEEEASRAQAGRRRLQRELEDVTESAESMNREVTTLRNRLRRGPLTFTTRTVRQVFRLEEGVASDEEAEEAQPGSGPSPEPEGSPPAHPQ

SEQ ID NO: 763 - protein, 1537 aa, Homo sapiens
MGEKLELRLKSPVGAEPAVYPWPLPVYDKHHDAAHEIIETIRWVCEEIPDLKLAMENYVLIDYDTKSFESMQRLCDKYNRAIDSIHQLWKGTTQPMKLNTRPSTGLLRHILQQVYNHSVTDPEKLNNYEPFSPEVYGETSFDLVAQMIDEIKMTDDDLFVDLGSGVGQVVLQVAAATNCKHHYGVEKADIPAKYAETMDREFRKWMKWYGKKHAEYTLERGDFLSEEWRERIANTSVIFVNNFAFGPEVDHQLKERFANMKEGGRIVSSKPFAPLNFRINSRNLSDIGTIMRVVELSPLKGSVSWTGKPVSYYLHTIDRTILENYFSSLKNPKLREEQEAARRRQQRESKSNAATPTKGPEGKVAGPADAPMDSGAEEEKAGAATVKKPSPSKARKKKLNKKGRKMAGRKRGRPKKMNTANPERKPKKNQTALDALHAQTVSQTAASSPQDAYRSPHSPFYQLPPSVQRHSPNPLLVAPTPPALQKLLESFKIQYLQFLAYTKTPQYKASLQELLGQEKEKNAQLLGAAQQLLSHCQAQKEEIRRLFQQKLDELGVKALTYNDLIQAQKEISAHNQQLREQSEQLEQDNRALRGQSLQLLKARCEELQLDWATLSLEKLLKEKQALKSQISEKQRHCLELQISIVELEKSQRQQELLQLKSCVPPDDALSLHLRGKGALGRELEPDASRLHLELDCTKFSLPHLSSMSPELSMNGQAAGYELCGVLSRPSSKQNTPQYLASPLDQEVVPCTPSHVGRPRLEKLSGLAAPDYTRLSPAKIVLRRHLSQDHTVPGRPAASELHSRAEHTKENGLPYQSPSVPGSMKLSPQDPRPLSPGALQLAGEKSSEKGLRERAYGSSGELITSLPISIPLSTVQPNKLPVSIPLASVVLPSRAERARSTPSPVLQPRDPSSTLEKQIGANAHGAGSRSLALAPAGFSYAGSVAISGALAGSPASLTPGAEPATLDESSSSGSLFATVGSRSSTPQHPLLLAQPRNSLPASPAHQLSSSPRLGGAAQGPLPEASKGDLPSDSGFSDPESEAKRRIVFTITTGAGSAKQSPSSKHSPLTASARGDCVPSHGQDSRRRGRRKRASAGTPSLSAGVSPKRRALPSVAGLFTQPSGSPLNLNSMVSNINQPLEITAISSPETSLKSSPVPYQDHDQPPVLKKERPLSQTNGAHYSPLTSDEEPGSEDEPSSARIERKIATISLESKSPPKTLENGGGLAGRKPAPAGEPVNSSKWKSTFSPISDIGLAKSADSPLQASSALSQNSLFTFRPALEEPSADAKLAAHPRKGFPGSLSGADGLSPGTNPANGCTFGGGLAADLSLHSFSDGASLPHKGPEAAGLSSPLSFPSQRGKEGSDANPFLSKRQLDGLAGLKGEGSRGKEAGEGGLPLCGPTDKTPLLSGKAAKARDREVDLKNGHNLFISAAAVPPGSLLSGPGLAPAASSAGGAASSAQTHRSFLGPFPPGPQFALGPMSLQANLGSVAGSSVLQSLFSSVPAAAGLVHVSSAATRLTNSHAMGSFSGVAGGTVGGN

SEQ ID NO: 764 - protein, 2634 aa, Homo sapiens
MSGGAAEKQSSTPGSLFLSPPAPAPKNGSSSDSSVGEKLGAAAADAVTGRTEEYRRRRHTMDKDSRGAAATTTTTEHRFFRRSVICDSNATALELPGLPLSLPQPSIPAAVPQSAPPEPHREETVTATATSQVAQQPPAAAAPGEQAVAGPAPSTVPSSTSKDRPVSQPSLVGSKEEPPPARSGSGGGSAKEPQEERSQQQDDIEELETKAVGMSNDGRFLKFDIEIGRGSFKTVYKGLDTETTVEVAWCELQDRKLTKSERQRFKEEAEMLKGLQHPNIVRFYDSWESTVKGKKCIVLVTELMTSGTLKTYLKRFKVMKIKVLRSWCRQILKGLQFLHTRTPPIIHRDLKCDNIFITGPTGSVKIGDLGLATLKRASFAKSVIGTPEFMAPEMYEEKYDESVDVYAFGMCMLEMATSEYPYSECQNAAQIYRRVTSGVKPASFDKVAIPEVKEIIEGCIRQNKDERYSIKDLLNHAFFQEETGVRVELAEEDDGEKIAIKLWLRIEDIKKLKGKYKDNEAIEFSFDLERDVPEDVAQEMVESGYVCEGDHKTMAKAIKDRVSLIKRKREQRQLVREEQEKKKQEESSLKQQVEQSSASQTGIKQLPSASTGIPTASTTSASVSTQVEPEEPEADQHQQLQYQQPSISVLSDGTVDSGQGSSVFTESRVSSQQTVSYGSQHEQAHSTGTVPGHIPSTVQAQSQPHGVYPPSSVPRRGRSMSVCVPIFLLLPLCPASLPVLFHPTASTVCTSFSFPPPDCPEETFAEKLSKALESVLPMHSASQRKHRRSSLPSLFVSTPQSMAHPCGGTPTYPESQIFFPTIHERPVSFSPPPTCPPKVAISQRRKSTSFLEAQTHHFQPLLRTVGQSLLPPGGSPTNWTPEAVVMLGTTASRVTGESCEIQVHPMFEPSQVYSDYRPGLVLPEEAHYFIPQEAVYVAGVHYQARVAEQYEGIPYNSSVLSSPMKQIPEQKPVQGGPTSSSVFEFPSGQAFLVGHLQNLRLDSGLGPGSPLSSISAPISTDATRLKFHPVFVPHSAPAVLTHNNESRSNCVFEFHVHTPSSSSGEGGGILPQRVYRNRQVAVDLNQEELPPQSVGLHGYLQPVTEEKHNYHAPELTVSVVEPIGQNWPIGSPEYSSDSSQITSSDPSDFQSPPPTGGAAAPFGSDVSMPFIHLPQTVLQESPLFFCFPQGTTSQQVLTASFSSGGSALHPQAQGQSQGQPSSSSLTGVSSSQPIQHPQQQQGIQQTAPPQQTVQYSLSQTSTSSEATTAQPVSQPQAPQVLPQVSAGKQSTQGVSQVAPAEPVAVAQTQATQPTTLASSVDSAHSDVASGMSDGNENVPSSSGRHEGRTTKRHYRKSVRSRSRHEKTSRPKLRILNVSNKGDRVVECQLETHNRKMVTFKFDLDGDNPEEIATIMVNNDFILAIERESFVDQVREIIEKADEMLSEDVSVEPEGDQGLESLQGKDDYGFSGSQKLEGEFKQPIPASSMPQQIGIPTSSLTQVVHSAGRRFIVSPVPESRLRESKVFPSEITDTVAASTAQSPGMNLSHSASSLSLQQAFSELRRAQMTEGPNTAPPNFSHTGPTFPVVPPFLSSIAGVPTTAAATAPVPATSSPPNDISTSVIQSEVTVPTEEGIAGVATSTGVVTSGGLPIPPVSESPVLSSVVSSITIPAVVSISTTSPSLQVPTSTSEIVVSSTALYPSVTVSATSASAGGSTATPGPKPPAVVSQQAAGSTTVGATLTSVSTTTSFPSTASQLCIQLSSSTSTPTLAETVVVSAHSLDKTSHSSTTGLAFSLSAPSSSSSPGAGVSSYISQPGGLHPLVIPSVIASTPILPQAAGPTSTPLLPQVPSIPPLVQPVANVPAVQQTLIHSQPQPALLPNQPHTHCPEVDSDTQPKAPGIDDIKTLEEKLRSLFSEHSSSGAQHASVSLETSLVIESTVTPGIPTTAVAPSKLLTSTTSTCLPPTNLPLGTVALPVTPVVTPGQVSTPVSTTTSGVKPGTAPSKPPLTKAPVLPVGTELPAGTLPSEQLPPFPGPSLTQSQQPLEDLDAQLRRTLSPEMITVTSAVGPVSMAAPTAITEAGTQPQKGVSQVKEGPVLATSSGAGVFKMGRFQVSVAADGAQKEGKNKSEDAKSVHFESSTSESSVLSSSSPESTLVKPEPNGITIPGISSDVPESAHKTTASEAKSDTGQPTKVGRFQVTTTANKVGRFSVSKTEDKITDTKKEGPVASPPFMDLEQAVLPAVIPKKEKPELSEPSHLNGPSSDPEAAFLSRDVDDGSGSPHSPHQLSSKSLPSQNLSQSLSNSFNSSYMSSDNESDIEDEDLKLELRRLRDKHLKEIQDLQSRQKHEIESLYTKLGKVPPAVIIPPAAPLSGRRRRPTKSKGSKSSRSSSLGNKSPQLSGNLSGQSAASVLHPQQTLHPPGNIPESGQNQLLQPLKPSPSSDNLYSAFTSDGAISVPSLSAPGQGTSSTNTVGATVNSQAAQAQPPAMTSSRKGTFTDDLHKLVDNWARDAMNLSGRRGSKGHMNYEGPGMARKFSAPGQLCISMTSNLGGSAPISAASATSLGHFTKSMCPPQQYGFPATPFGAQWSGTGGPAPQPLGQFQPVGTASLQNFNISNLQKSISNPPGSNLRTT

SEQ ID NO: 765 - protein, 3234 aa, Homo sapiens
MVKRKSSEGQEQDGGRGIPLPIQTFLWRQTSAFLRPKLGKQYEASCVSFERVLVENKLHGLSPALSEAIQSISRWELVQAALPHVLHCTATLLSNRNKLGHQDKLGVAETKLLHTLHWMLLEAPQDCNNERFGGTDRGSSWGGSSSAFIHQVENQGSPGQPCQSSSNDEEENNRRKIFQNSMATVELFVFLFAPLVHRIKESDLTFRLASGLVIWQPMWEHRQPGVSGFTALVKPIRNIITAKRSSPINSQSRTCESPNQDARHLEGLQVVCETFQSDSISPKATISGCHRGNSFDGSLSSQTSQERGPSHSRASLVIPPCQRSRYATYFDVAVLRCLLQPHWSEEGTQWSLMYYLQRLRHMLEEKPEKPPEPDIPLLPRPRSSSMVAAAPSLVNTHKTQDLTMKCNEEEKSLSSEAFSKVSLTNLRRSAVPDLSSDLGMNIFKKFKSRKEDRERKGSIPFHHTGKRRPRRMGVPFLLHEDHLDVSPTRSTFSFGSFSGLGEDRRGIEKGGWQTTILGKLTRRGSSDAATEMESLSARHSHSHHTLVSDLPDPSNSHGENTVKEVRSQISTITVATFNTTLASFNVGYADFFNEHMRKLCNQVPIPEMPHEPLACANLPRSLTDSCINYSYLEDTEHIDGTNNFVHKNGMLDLSVVLKAVYLVLNHDISSRICDVALNIVECLLQLGVVPCVEKNRKKSENKENETLEKRPSEGAFQFKGVSGSSTCGFGGPAVSGAGDGGGEEGGGGDGGGGGGDGGGGGGGGGGPYEKNDKNQEKDESTPVSNHRLALTMLIKIVKSLGCAYGCGEGHRGLSGDRLRHQAQNCLTKLYKLDKMQFRQTMRDYVNKDSLNNVVDFLHALLGFCMEPVTDNKAGFGNNFTTVDNKSTAQNVEGIIVSAMFKSLITRCASTTHELHSPENLGLYCDIRQLVQFIKEAHGNVFRRVALSALLDSAEKLAPGKKVEENEQESKPAGSKRSEAGSIVDKGQVSSAPEECRSFMSGRPSQTPEHDEQMQGANLGRKDFWRKMFKSQSAASDTSSQSEQDTSECTTAHSGTTSDRRARSRSRRISLRKKLKLPIGKRNWLKRSSLSGLADGVEDLLDISSVDRLSFIRQSSKVKFTSAVKLSEGGPGSGMENGRDEEENFFKRLGCHSFDDHLSPNQDGGKSKNVVNLGAIRQGMKRFQFLLNCCEPGTIPDASILAAALDLEAPVVARAALFLECARFVHRCNRGNWPEWMKGHHVNITKKGLSRGRSPIVGNKRNQKLQWNAAKLFYQWGDAIGVRLNELCHGESESPANLLGLIYDEETKRRLRKEDEEEDFLDDSTVNPSKCGCPFALKMAACQLLLEITTFLRETFSCLPRPRTEPLVDLESCRLRLDPELDRHRYERKISFAGVLDENEDSKDSLHSSSHTLKSDAGVEEKKEGSPWSASEPSIEPEGMSNAGAEENYHRNMSWLHVMILLCNQQSFICTHVDYCHPHCYLHHSRSCARLVRAIKLLYGDSVDSLRESSNISSVALRGKKQKECSDKSCLRTPSLKKRVSDANLEGKKDSGMLKYIRLQVMSLSPAPLSLLIKAAPILTEEMYGDIQPAAWELLLSMDEHMAGAAAAMFLLCAVKVPEAVSDMLMSEFHHPETVQRLNAVLKFHTLWRFRYQVWPRMEEGAQQIFKIPPPSINFTLPSPVLGMPSVPMFDPPWVPQCSGSVQDPINEDQSKSFSARAVSRSHQRAEHILKNLQQEEEKKRLGREASLITAIPITQEACYEPTCTPNSEPEEEVEEVTNLASRRLSVSPSCTSSTSHRNYSFRRGSVWSVRSAVSAEDEEHTTEHTPNHHVPQPPQAVFPACICAAVLPIVHLMEDGEVREDGVAVSAVAQQVLWNCLIEDPSTVLRHFLEKLTISNRQDELMYMLRKLLLNIGDFPAQTSHILFNYLVGLIMYFVRTPCEWGMDAISATLTFLWEVVGYVEGLFFKDLKQTMKKEQCEVKLLVTASMPGTKTLVVHGQNECDIPTQLPVHEDTQFEALLKECLEFFNIPESQSTHYFLMDKRWNLIHYNKTYVRDIYPFRRSVSPQLNLVHMHPEKGQELIQKQVFTRKLEEVGRVLFLISLTQKIPTAHKQSHVSMLQEDLLRLPSFPRSAIDAEFSLFSDPQAGKELFGLDTLQKSLWIQLLEEMFLGMPSEFPWGDEIMLFLNVFNGALILHPEDSALLRQYAATVINTAVHFNHLFSLSGYQWILPTMLQVYSDYESNPQLRQAIEFACHQFYILHRKPFVLQLFASVAPLLEFPDAANNGPSKGVSAQCLFDLLQSLEGETTDILDILELVKAEKPLKSLDFCYGNEDLTFSISEAIKLCVTVVAYAPESFRSLQMLMVLEALVPCYLQKLKRQTSQVETVPAAREEIAATAALATSLQALLYSVEVLTRPMTAPQMSRCDQGHKGTTTANHTMSSGVNTRYQEQGAKLHFIRENLHLLEEGQGIPREELDERIAREEFRRPRESLLNICTEFYKHCGPRLKILQNLAGEPRVIALELLDVKSHMRLAEIAHSLLKLAPYDTQTMESRGLRRYIMEMLPITDWTAEAVRPALILILKRLDRMFNKIHKMPTLRRQVEWEPASNLIEGVCLTLQRQPIISFLPHLRSLINVCVNLVMGVVGPSSVADGLPLLHLSPYLSPPLPFSTAVVRLVALQIQALKEDFPLSHVISPFTNQERREGMLLNLLIPFVLTVGSGSKDSPWLEQPEVQLLLQTVINVLLPPRIISTSRSKNFMLESSPAHCSTPGDAGKDLRREGLAESTSQAAYLALKVILVCFERQLGSQWYWLSLQVKEMALRKVGGLALWDFLDFIVRTRIPIFVLLRPFIQCKLLAQPAENHEELSARQHIADQLERRFIPRPLCKSSLIAEFNSELKILKEAVHSGSAYQGKTSISTVGTSTSAYRLSLATMSRSNTGTGTVWEQDSEPSQQASQDTLSRTDEEDEENDSISMPSVVSEQEAYLLSAIGRRRFSSHVSSMSVPQAEVGMLPSQRVASIQSEPGQQNLLVQQPLGRKRGLRQLRRPLLSRQKTQTEPRNRQGARLSTTRRSIQPKTKPSADQKRSVTFIEAQPEPAAAPTDALPATGQLQGCSPAPSRKPEAMDEPVLTSSPAIVVADLHSVSPKQSENFPTEEGEKEEDTEAQGATAHSPLSAQLSDPDDFTGLETSSLLQHGDTVLHISEENGMENPLLSSQFTFTPTELGKTDAVLDESHV

SEQ ID NO: 766 - protein, 112 aa, Homo sapiens
DIQMTQSPSSLSATVGDRVTLLCEASQSVLESGNTFLAWYQQKPKKAPKLLIYDASNLETGVPSRFSESGSGTDFTFTISGLZPZBFAVYYCQZYDTLPSTFGVASKVESKR

SEQ ID NO: 767 - protein, 1471 aa, Homo sapiens
MVSKRRLSKSEDKESLTEDASKTRKQPLSKKTKKSHIANEVEENDSIFVKLLKISGIILKTGESQNQLAVDQIAFQKKLFQTLRRHPSYPKIIEEFVSGLESYIEDEDSFRNCLLSCERLQDEEASMGASYSKSLIKLLLGIDILQPAIIKTLFEKLPEYFFENKNSDEINIPRLIVSQLKWLDRVVDGKDLTTKIMQLISIAPENLQHDIITSLPEILGDSQHADVGKELSDLLIENTSLTVPILDVLSSLRLDPNFLLKVRQLVMDKLSSIRLEDLPVIIKFILHSVTAMDTLEVISELREKLDLQHCVLPSRLQASQVKLKSKGRASSSGNQESSGQSCIILLFDVIKSAIRYEKTISEAWIKAIENTASVSEHKVFDLVMLFIIYSTNTQTKKYIDRVLRNKIRSGCIQEQLLQSTFSVHYLVLKDMCSSILSLAQSLLHSLDQSIISFGSLLYKYAFKFFDTYCQQEVVGALVTHICSGNEAEVDTALDVLLELVVLNPSAMMMNAVFVKGILDYLDNISPQQIRKLFYVLSTLAFSKQNEASSHIQDDMHLVIRKQLSSTVFKYKLIGIIGAVTMAGIMAADRSESPSLTQERANLSDEQCTQVTSLLQLVHSCSEQSPQASALYYDEFANLIQHEKLDPKALEWVGHTICNDFQDAFVVDSCVVPEGDFPFPVKALYGLEEYDTQDGIAINLLPLLFSQDFAKDGGPVTSQESGQKLVSPLCLAPYFRLLRLCVERQHNGNLEEIDGLLDCPIFLTDLEPGEKLESMSAKERSFMCSLIFLTLNWFREIVNAFCQETSPEMKGKVLTRLKHIVELQIILEKYLAVTPDYVPPLGNFDVETLDITPHTVTAISAKIRKKGKIERKQKTDGSKTSSSDTLSEEKNSECDPTPSHRGQLNKEFTGKEEKTSLLLHNSHAFFRELDIEVFSILHCGLVTKFILDTEMHTEATEVVQLGPPELLFLLEDLSQKLESMLTPPIARRVPFLKNKGSRNIGFSHLQQRSAQEIVHCVFQLLTPMCNHLENIHNYFQCLAAENHGVVDGPGVKVQEYHIMSSCYQRLLQIFHGLFAWSGFSQPENQNLLYSALHVLSSRLKQGEHSQPLEELLSQSVHYLQNFHQSIPSFQCALYLIRLLMVILEKSTASAQNKEKIASLARQFLCRVWPSGDKEKSNISNDQLHALLCIYLEHTESILKAIEEIAGVGVPELINSPKDASSSTFPTLTRHTFVVFFRVMMAELEKTVKKIEPGTAADSQQIHEEKLLYWNMAVRDFSILINLIKVFDSHPVLHVCLKYGRLFVEAFLKQCMPLLDFSFRKHREDVLSLLETFQLDTRLLHHLCGHSKIHQDTRLTQHVPLLKKTLELLVCRVKAMLTLNNCREAFWLGNLKNRDLQGEEIKSQNSQESTADESEDDMSSQASKSKATEVSLQNPPESGTDGCILLIVLSWWSRTLPTYVYCQMLLCPFPFPP

SEQ ID NO: 768 - protein, 2017 aa, Homo sapiens
MIILSKSQKSWIKGVFDKRECSTIIPSSKNPHRCTPVCQVCQNLIRCYCGRLIGDHAGIDYSWTISAAKGKESEQWSVEKHTTKSPTDTFGTINFQDGEHTHHAKYIRTSYDTKLDHLLHLMLKEWKMELPKLVISVHGGIQNFTMPSKFKEIFSQGLVKAAETTGAWIITEGINTGVSKHVGDALKSHSSHSLRKIWTVGIPPWGVIENQRDLIGKDVVCLYQTLDNPLSKLTTLNSMHSHFILSDDGTVGKYGNEMKLRRNLEKYLSLQKIHCRSRQGVPVVGLVVEGGPNVILSVWETVKDKDPVVVCEGTGRAADLLAFTHKHLADEGMLRPQVKEEIICMIQNTFNFSLKQSKHLFQILMECMVHRDCITIFDADSEEQQDLDLAILTALLKGTNLSASEQLNLAMAWDRVDIAKKHILIYEQHWKPDALEQAMSDALVMDRVDFVKLLIEYGVNLHRFLTIPRLEELYNTKQGPTNTLLHHLVQDVKQHTLLSGYRITLIDIGLVVEYLIGRAYRSNYTRKHFRALYNNLYRKYKHQRHSSGNRNESAESTLHSQFIRTAQPYKFKEKSIVLHKSRKKSKEQNVSDDPESTGFLYPYNDLLVWAVLMKRQKMAMFFWQHGEEATVKAVIACILYRAMAHEAKESHMVDDASEELKNYSKQFGQLALDLLEKAFKQNERMAMTLLTYELRNWSNSTCLKLAVSGGLRPFVSHTCTQMLLTDMWMGRLKMRKNSWLKIIISIILPPTILTLEFKSKAEMSHVPQSQDFQFMWYYSDQNASSSKESASVKEYDLERGHDEKLDENQHFGLESGHQHLPWTRKVYEFYSAPIVKFWFYTMAYLAFLMLFTYTVLVEMQPQPSVQEWLVSIYIFTNAIEVVREICISEPGKFTQKVKVWISEYWNLTETVAIGLFSAGFVLRWGDPPFHTAGRLIYCIDIIFWFSRLLDFFAVNQHAGPYVTMIAKMTANMFYIVIIMAIVLLSFGVARKAILSPKEPPSWSLARDIVFEPYWMIYGEVYAGEIDVCSSQPSCPPGSFLTPFLQAVYLFVQYIIMVNLLIAFFNNVYLDMESISNNLWKYNRYRYIMTYHEKPWLPPPLILLSHVGLLLRRLCCHRAPHDQEEGDVGLKLYLSKEDLKKLHDFEEQCVEKYFHEKMEDVNCSCEERIRVTSERVTEMYFQLKEMNEKVSFIKDSLLSLDSQVGHLQDLSALTVDTLKVLSAVDTLQEDEALLAKRKHSTCKKLPHSWSNVICAEVLGSMEIAGEKKYQYYSMPSSLLRSLAGGRHPPRVQRGALLEITNSKREATNVRNDQERQETQSSIVVSGVSPNRQAHSKYGQFLLVPSNLKRVPFSAETVLPLSRPSVPDVLATEQDIQTEVLVHLTGQTPVVSDWASVDEPKEKHEPIAHLLDGQDKAEQVLPTLSCTPEPMTMSSPLSQAKIMQTGGGYVNWAFSEGDETGVFSIKKKWQTCLPSTCDSDSSRSEQHQKQAQDSSLSDNSTRSAQSSECSEVGPWLQPNTSFWINPLRRYRPFARSHSFRFHKEEKLMKICKIKNLSGSSEIGQGAWVKAKMLTKDRRLSKKKKNTQGLQVPIITVNACSQSDQLNPEPGENSISEEEYSKNWFTVSKFSHTGVEPYIHQKMKTKEIGQCAIQISDYLKQSQEDLSKNSLWNSRSTNLNRNSLLKSSIGVDKISASLKSPQEPHHHYSAIERNNLMRLSQTIPFTPVQLFAGEEITVYRLEESSPLNLDKSMSSWSQRGRAAMIQVLSREEMDGGLRKAMRVVSTWSEDDILKPGQVFIVKSFLPEVVRTWHKIFQESTVLHLCLREIQQQRAAQKLIYTFNQVKPQTIPYTPRFLEVFLIYCHSANQWLTIEKYMTGEFRKYNNNNGDEITPTNTLEELMLAFSHWTYEYTRGELLVLDLQGVGENLTDPSVIKPEVKQSRGMVFGPANLGEDAIRNFIAKHHCNSCCRKLKLPDLKRNDYSPERINSTFGLEIKIESAEEPPARETGRNSPEDDMQL

SEQ ID NO: 769 - protein, 1770 aa, Homo sapiens
MSGASVKVAVRVRPFNSRETSKESKCIIQMQGNSTSIINPKNPKEAPKSFSFDYSYWSHTSPEDPCFASQNRVYNDIGKEMLLHAFEGYNVCIFAYGQTGAGKSYTMMGKQEESQAGIIPQLCEELFEKINDNCNEEMSYSVEVSYMEIYCERVRDLLNPKNKGNLRVREHPLLGPYVEDLSKLAVTSYTDIADLMDAGNKARTVAATNMNETSSRSHAVFTIVFTQKKHDNETNLSTEKVSKISLVDLAGSERADSTGAKGTRLKEGANINKSLTTLGKVISALAEVSKKKKKTDFIPYRDSVLTWLLRENLGGNSRTAMVAALSPADINYDETLSTLRYADRAKQIKCNAVINEDPNAKLVRELKEEVTRLKDLLRAQGLGDIIDTSMGSLTSSPSSCSLSSQVGLTSVTSIQERIMSTPGGEEAIERLKESEKIIAELNETWEEKLRKTEAIRMEREALLAEMGVAIREDGGTLGVFSPKKTPHLVNLNEDPLMSECLLYYIKDGITRVGQADAERRQDIVLSGAHIKEEHCIFRSERSNSGEVIVTLEPCERSETYVNGKRVSQPVQLRSGNRIIMGKNHVFRFNHPEQARAEREKTPSAETPSEPVDWTFAQRELLEKQGIDMKQEMEKRLQEMEILYKKEKEEADLLLEQQRLDYESKLQALQKQVETRSLAAETTEEEEEEEEVPWTQHEFELAQWAFRKWKSHQFTSLRDLLWGNAVYLKEANAISVELKKKVQFQFVLLTDTLYSPLPPELLPTEMEKTHEDRPFPRTVVAVEVQDLKNGATHYWSLEKLKQRLDLMREMYDRAGEMASSAQDESETTVTGSDPFYDRFHWFKLVGSSPIFHGCVNERLADRTPSPTFSTADSDITELADEQQDEMEDFDDEAFVDDAGSDAGTEEGSDLFSDGHDPFYDRSPWFILVGRAFVYLSNLLYPVPLIHRVAIVSEKGEVRGFLRVAVQAIAADEEAPDYGSGIRQSGTAKISFDNEYFNQSDFSSVAMTRSGLSLEELRIVEGQGQSSEVITPPEEISRINDLDLKSSTLLDGKMVMEGFSEEIGNHLKLGSAFTFRVTVLQASGILPEYADIFCQFNFLHRHDEAFSTEPLKNNGRGSPLAFYHVQNIAVEITESFVDYIKTKPIVFEVFGHYQQHPLHLQGQELNSPPQPCRRFFPPPMPLSKPVPATKLNTMSKTSLGQSMSKYDLLVWFEISELEPTGEYIPAVVDHTAGLPCQGTFLLHQGIQRRITVTIIHEKGSELHWKDVRELVVGRIRNKPEVDEAAVDAILSLNIISAKYLKSSHNSSRTFYRFEAVWDSSLHNSLLLNRVTPYGEKIYMTLSAYLELDHCIQPAVITKDVCMVFYSRDAKISPPRSLRSLFGSGYSKSPDSNRVTGIYELSLCKMSDTGSPGMQRRRRKILDTSVAYVRGEENLAGWRPRGDSLILEHQWELEKLELLHEVEKTRHFLLLRERLGDSIPKSLSDSLSPSLSSGTLSTSTSISSQISTTTFESAITPSESSGYDSGDIESLVDREKELATKCLQLLTHTFNREFSQVHGSVSDCKLSDISPIGRDPSESSFSSATLTPSSTCPSLVDSRSNSLDQKTPEANSRASSPCPEFEQFQIVPAVETPYLARAGKNEFLNLVPDIEEIRPSSVVSKKGYLHFKEPLYSNWAKHFVVVRRPYVFIYNSDKDPVERGIINLSTAQVEYSEDQQAMVKTPNTFAVCTKHRGVLLQALNDKDMNDWLYAFNPLLAGTIRSKLSRRCPSQSKY

SEQ ID NO: 770 - protein, 1483 aa, Homo sapiens
MLHLPLPRSGRTVNFPRSWDESSSISSGLSDASDNLSSEEFNASSSLNSLPSTPTASRRNSTIVLRTDSEKRSLAESGLSWFSESEEKAPKKLEYDSGSLKMEPGTSKWRRERPESCDDSSKGGELKKPISLGHPGSLKKGKTPPVAVTSPITHTAQSALKVAGKPEGKATDKGKLAVKNTGLQRSSSDAGRDRLSDAKKPPSGIARPSTSGSFGYKKPPPATGTATVMQTGGSATLSKIQKSSGIPVKPVNGRKTSLDVSNSAEPGFLAPGARSNIQYRSLPRPAKSSSMSVTGGRGGPRPVSSSIDPSLLSTKQGGLTPSRLKEPTKVASGRTTPAPVNQTDREKEKAKAKAVALDSDNISLKSIGSPESTPKNQASHPTATKLAELPPTPLRATAKSFVKPPSLANLDKVNSNSLDLPSSSDTTHASKVPDLHATSSASGGPLPSCFTPSPAPILNINSASFSQGLELMSGFSVPKETRMYPKLSGLHRSMESLQMPMSLPSAFPSSTPVPTPPAPPAAPTEEETEELTWSGSPRAGQLDSNQRDRNTLPKKGLRYQLQSQEETKERRHSHTIGGLPESDDQSELPSPPALPMSLSAKGQLTNIVSPTAATTPRITRSNSIPTHEAAFELYSGSQMGSTLSLAERPKGMIRSGSFRDPTDDVHGSVLSLASSASSTYSSAEERMQSEQIRKLRRELESSQEKVATLTSQLSANANLVAAFEQSLVNMTSRLRHLAETAEEKDTELLDLRETIDFLKKKNSEAQAVIQGALNASETTPKELRIKRQNSSDSISSLNSITSHSSIGSSKDADAKKKKKKSWLRSSFNKAFSIKKGPKSASSYSDIEEIATPDSSAPSSPKLQHGSTETASPSIKSSTSSSVGTDVTEGPAHPAPHTRLFHANEEEEPEKKEVSELRSELWEKEMKLTDIRLEALNSAHQLDQLRETMHNMQLEVDLLKAENDRLKVAPGPSSGSTPGQVPGSSALSSPRRSLGLALTHSFGPSLADTDLSPMDGISTCGPKEEVTLRVVVRMPPQHIIKGDLKQQEFFLGCSKVSGKVDWKMLDEAVFQVFKDYISKMDPASTLGLSTESIHGYSISHVKRVLDAEPPEMPPCRRGVNNISVSLKGLKEKCVDSLVFETLIPKPMMQHYISLLLKHRRLVLSGPSGTGKTYLTNRLAEYLVERSGREVTEGIVSTFNMHQQSCKDLQLYLSNLANQIDRETGIGDVPLVILLDDLSEAGSISELVNGALTCKYHKCPYIIGTTNQPVKMTPNHGLHLSFRMLTFSNNVEPANGFLVRYLRRKLVESDSDINANKEELLRVLDWVPKLWYHLHTFLEKHSTSDFLIGPCFFLSCPIGIEDFRTWFIDLWNNSIIPYLQEGAKDGIKVHGQKAAWEDPVEWVRDTLPWPSAQQDQSKLYHLPPPTVGPHSIASPPEDRTVKDSTPSSLDSDPLMAMLLKLQEAANYIESPDRETILDPNLQATL

SEQ ID NO: 771 - protein, 1430 aa, Homo sapiens
MSRPSSVSPRQPAPGGGGGGGPSPCGPGGGGRAKGLKDIRIDEEVKIAVNIALERFRYGDQREMEFPSSLTSTERAFIHRLSQSLGLVSKSKGKGANRYLTVKKKDGSETAHAMMTCNLTHNTKHAVRSLIQRFPVTNKERTELLPKTERGNVFAVEAENREMSKTSGRLNNGIPQIPVKRGESEFDSFRQSLPVFEKQEEIVKIIKENKVVLIVGETGSGKTTQIPQFLLDDCFKNGIPCRIFCTQPRRLAAIAVAERVAAERRERIGQTIGYQIRLESRVSPKTLLTFCTNGVLLRTLMAGDSTLSTVTHVIVDEVHERDRFSDFLLTKLRDLLQKHPTLKLILSSAALDVNLFIRYFGSCPVIYIQGRPFEVKEMFLEDILRTTGYTNKEMLKYKKEKQQEEKQQTTLTEWYSAQENSFKPESQRQRTVLNVTDEYDLLDDGGDAVFSQLTEKDVNCLEPWLIKEMDACLSDIWLHKDIDAFAQVFHLILTENVSVDYRHSETSATALMVAAGRGFASQVEQLISMGANVHSKASNGWMALDWAKHFGQTEIVDLLESYSATLEFGNLDESSLVQTNGSDLSAEDRELLKAYHHSFDDEKVDLDLIMHLLYNICHSCDAGAVLIFLPGYDEIVGLRDRILFDDKRFADSTHRYQVFMLHSNMQTSDQKKVLKNPPAGVRKIILSTNIAETSITVNDVVFVIDSGKVKEKSFDALNFVTMLKMVWISKASAIQRKGRAGRCRPGICFRLFSRLRFQNMLEFQTPELLRMPLQELCLHTKLLAPVNCPIADFLMKAPEPPPALIVRNAVQMLKTIDAMDTWEDLTELGYHLADLPVEPHLGKMVLCAVVLKCLDPILTIACTLAYRDPFVLPTQASQKRAAMLCRKRFTAGAFSDHMALLRAFQAWQKARSDGWERAFCEKNFLSQATMEIIIGMRTQLLGQLRASGFVRARGGGDIRDVNTNSENWAVVKAALVAGMYPNLVHVDRENLVLTGPKEKKVRFHPASVLSQPQYKKIPPANGQAAAIKALPTDWLIYDEMTRAHRIANIRCCSAVTPVTILVFCGPARLASNALQEPSSFRVDGIPNDSSDSEMEDKTTANLAALKLDEWLHFTLEPEAASLLLQLRQKWHSLFLRRMRAPSKPWSQVDEATIRAIIAVLSTEEQSAGLQQPSGIGQRPRPMSSEELPLASSWRSNNSRKSSADTEFSDECTTAERVLMKSPSPALHPPQKYKDRGILHPKRGTEDRSDQSSLKSTDSSSYPSPCASPSPPSSGKGSKSPSPRPNMPVRYFIMKSSNLRNLEISQQKGIWSTTPSNERKLNRAFWESSIVYLVFSVQGSGHFQGFSRMSSEIGREKSQDWGSAGLGGVFKVEWIRKESLPFQFAHHLLNPWNDNKKVQISRDGQELEPLVGEQLLQLWERLPLGEKNTTD

SEQ ID NO: 772 - protein, 1426 aa, Homo sapiens
MTEALQWARYHWRRLIRGATRDDDSGPYNYSSLLACGRKSSQTPKLSGRHRIVVPHIQPFKDEYEKFSGAYVNNRIRTTKYTLLNFVPRNLFEQFHRAANLYFLFLVVLNWVPLVEAFQKEITMLPLVVVLTIIAIKDGLEDYRKYKIDKQINNLITKVYSRKEKKYIDRCWKDVTVGDFIRLSCNEVIPADMVLLFSTDPDGICHIETSGLDGESNLKQRQVVRGYAEQDSEVDPEKFSSRIECESPNNDLSRFRGFLEHSNKERVGLSKENLLLRGCTIRNTEAVVGIVVYAGHETKAMLNNSGPRYKRSKLERRANTDVLWCVMLLVIMCLTGAVGHGIWLSRYEKMHFFNVPEPDGHIISPLLAGFYMFWTMIILLQVLIPISLYVSIEIVKLGQIYFIQSDVDFYNEKMDSIVQCRALNIAEDLGQIQYLFSDKTGTLTENKMVFRRCSVAGFDYCHEENARRLESYQEAVSEDEDFIDTVSGSLSNMAKPRAPSCRTVHNGPLGNKPSNHLAGSSFTLGSGEGASEVPHSRQAAFSSPIETDVVPDTRLLDKFSQITPRLFMPLDETIQNPPMETLYIIDFFIALAICNTVVVSAPNQPRQKIRHPSLGGLPIKSLEEIKSLFQRWSVRRSSSPSLNSGKEPSSGVPNAFVSRLPLFSRMKPASPVEEEVSQVCESPQCSSSSACCTETEKQHGDAGLLNGKAESLPGQPLACNLCYEAESPDEAALVYAARAYQCTLRSRTPEQVMVDFAALGPLTFQLLHILPFDSVRKRMSVVVRHPLSNQVVVYTKGADSVIMELLSVASPDGASLEKQQMIVREKTQKHLDDYAKQGLRTLCIAKKVMSDTEYAEWLRNHFLAETSIDNREELLLESAMRLENKLTLLGATGIEDRLQEGVPESIEALHKAGIKIWMLTGDKQETAVNIAYACKLLEPDDKLFILNTQSKDACGMLMSTILKELQKKTQALPEQVSLSEDLLQPPVPRDSGLRAGLIITGKTLEFALQESLQKQFLELTSWCQAVVCCRATPLQKSEVVKLVRSHLQVMTLAIGDGANDVSMIQVADIGIGVSGQEGMQAVMASDFAVSQFKHLSKLLLVHGHWCYTRLSNMILYFFYKNVAYVNLLFWYQFFCGFSGTSMTDYWVLIFFNLLFTSAPPVIYGVLEKDVSAETLMQLPELYRSGQKSEAYLPHTFWITLLDAFYQSLVCFFVPYFTYQGSDTDIFAFGNPLNTAALFIVLLHLVIESKSLTWIHLLVIIGSILSYFLFAIVFGAMCVTCNPPSNPYWIMQEHMLDPVFYLVCILTTSIALLPRFVYRVLQGSLFPSPILRAKHFDRLTPEERTKALKKWRGAGKMNQVTSKYANQSAGKSGRRPMPGPSAVFAMKSASSCAIEQGNLSLCETALDQGYSETKAFEMAGPSKGKES

SEQ ID NO: 773 - protein, 1649 aa, Homo sapiens
MAGGRGAPGRGRDEPPESYPQRQDHELQALEAIYGADFQDLRPDACGPVKEPPEINLVLYPQGLTGEEVYVKVDLRVKCPPTYPDVVPEIELKNAKGLSNESVNLLKSRLEELAKKHCGEVMIFELAYHVQSFLSEHNKPPPKSFHEEMLERRAQEEQQRLLEAKRKEEQEQREILHEIQRRKEEIKEEKKRKEMAKQERLEIASLSNQDHTSKKDPGGHRTAAILHGGSPDFVGNGKHRANSSGRSRRERQYSVCNSEDSPGSCEILYFNMGSPDQLMVHKGKCIGSDEQLGKLVYNALETATGGFVLLYEWVLQWQKKMGPFLTSQEKEKIDKCKKQIQGTETEFNSLVKLSHPNVVRYLAMNLKEQDDSIVVDILVEHISGVSLAAHLSHSGPIPVHQLRRYTAQLLSGLDYLHSNSVVHKVLSASNVLVDAEGTVKITDYSISKRLADICKEDVFEQTRVRFSDNALPYKTGKKGDVWRLGLLLLSLSQGQECGEYPVTIPSDLPADFQDFLKKCVCLDDKERWSPQQLLKHSFINPQPKMPLVEQSPEDSEGQDYVETVIPSNRLPSAAFFSETQRQFSRYFIEFEELQLLGKGAFGAVIKVQNKLDGCCYAVKRIPINPASRQFRRIKGEVTLLSRLHHENIVRYYNAWIERHERPAGPGTPPPDSGPLAKDDRAARGQPASDTDGLDSVEAAAPPPILSSSVEWSTSGERSASARFPATGPGSSDDEDDDEDEHGGVFSQSFLPASDSESDIIFDNEDENSKSQNQDEDCNEKNGCHESEPSVTTEAVHYLYIQMEYCEKSTLRDTIDQGLYRDTVRLWRLFREILDGLAYIHEKGMIHRDLKPVNIFLDSDDHVKIGDFGLATDHLAFSADSKQDDQTGDLIKSDPSGHLTGMVGTALYVSPEVQGSTKSAYNQKVDLFSLGIIFFEMSYHPMVTASERIFVLNQLRDPTSPKFPEDFDDGEHAKQKSVISWLLNHDPAKRPTATELLKSELLPPPQMEESELHEVLHHTLTNVDGKAYRTMMAQIFSQRISPAIDYTYDSDILKGNFSIRTAKMQQHVCETIIRIFKRHGAVQLCTPLLLPRNRQIYEHNEAALFMDHSGMLVMLPFDLRIPFARYVARNNILNLKRYCIERVFRPRKLDRFHPKELLECAFDIVTSTTNSFLPTAEIIYTIYEIIQEFPALQERNYSIYLNHTMLLKAILLHCGIPEDKLSQVYIILYDAVTEKLTRREVEAKFCNLSLSSNSLCRLYKFIEQKGDLQDLMPTINSLIKQKTGIAQLVKYGLKDLEEVVGLLKKLGIKLQVLINLGLVYKVQQHNGIIFQFVAFIKRRQRAVPEILAAGGRYDLLIPQFRGPQALGPVPTAIGVSIAIDKISAAVLNMEESVTISSCDLLVVSVGQMSMSRAINLTQKLWTAGITAEIMYDWSQSQEELQEYCRHHEITYVALVSDKEGSHVKVKSFEKERQTEKRVLETELVDHVLQKLRTKVTDERNGREASDNLAVQNLKGSFSNASGLFEIHGATVVPIVSVLAPEKLSASTRRRYETQVQTRLQTSLANLHQKSSEIEILAVDLPKETILQFLSLEWDADEQAFNTTVKQLLSRLPKQRYLKLVCDEIYNIKVEKKVSVLFLYSYRDDYYRILF

SEQ ID NO: 774 - protein, 1192 aa, Homo sapiens
MAACGRVRRMFRLSAALHLLLLFAAGAEKLPGQGVHSQGQGPGANFVSFVGQAGGGGPAGQQLPQLPQSSQLQQQQQQQQQQQQPQPPQPPFPAGGPPARRGGAGAGGGWKLAEEESCREDVTRVCPKHTWSNNLAVLECLQDVRELLWNYKLNLTTDPKFESVAREVCKSTITEIKECADEPVGKGYMVSCLVDHRGNITEYQCHQYITKMTAIIFSDYRLICGFMDDCKNDINILKCGSIRLGEKDAHSQGEVVSCLEKGLVKEAEEREPKIQVSELCKKAILRVAELSSDDFHLDRHLYFACRDDRERFCENTQAGEGRVYKCLFNHKFEESMSEKCREALTTRQKLIAQDYKVSYSLAKSCKSDLKKYRCNVENLPRSREARLSYLLMCLESAVHRGRQVSSECQGEMLDYRRMLMEDFSLSPEIILSCRGEIEHHCSGLHRKGRTLHCLMKVVRGEKGNLGMNCQQALQTLIQETDPGADYRIDRALNEACESVIQTACKHIRSGDPMILSCLMEHLYTEKMVEDCEHRLLELQYFISRDWKLDPVLYRKCQGDASRLCHTHGWNETSEFMPQGAVFSCLYRHAYRTEEQGRRLSRECRAEVQRILHQRAMDVKLDPALQDKCLIDLGKWCSEKTETGQELECLQDHLDDLVVECRDIVGNLTELESEDIQIEALLMRACEPIIQNFCHDVADNQIDSGDLMECLIQNKHQKDMNEKCAIGVTHFQLVQMKDFRFSYKFKMACKEDVLKLCPNIKKKVDVVICLSTTVRNDTLQEAKEHRVSLKCRRQLRVEELEMTEDIRLEPDLYEACKSDIKNFCSAVQYGNAQIIECLKENKKQLSTRCHQKVFKLQETEMMDPELDYTLMRVCKQMIKRFCPEADSKTMLQCLKQNKNSELMDPKCKQMITKRQITQNTDYRLNPMLRKACKADIPKFCHGILTKAKDDSELEGQVISCLKLRYADQRLSSDCEDQIRIIIQESALDYRLDPQLQLHCSDEISSLCAEEAAAQEQTGQVEECLKVNLLKIKTELCKKEVLNMLKESKADIFVDPVLHTACALDIKHHCAAITPGRGRQMSCLMEALEDKRVRLQPECKKRLNDRIEMWSYAAKVAPADGFSDLAMQVMTSPSKNYILSVISGSICILFLIGLMCGRITKRVTRELKDRLQYRSETMAYKGLVWSQDVTGSPA

SEQ ID NO: 775 - protein, 1120 aa, Homo sapiens
MVLNSLDKMIQLQKNTANIRNICVLAHVDHGKTTLADCLISSNGIISSRLAGKLRYMDSREDEQIRGITMKSSAISLHYATGNEEYLINLIDSPGHVDFSSEVSTAVRICDGCIIVVDAVEGVCPQTQAVLRQAWLENIRPVLVINKIDRLIVELKFTPQEAYSHLKNILEQINALTGTLFTSKVLEERAERETESQVNPNSEQGEQVYDWSTGLEDTDDSHLYFSPEQGNVVFTSAIDGWGFGIEHFARIYSQKIGIKKEVLMKTLWGDYYINMKAKKIMKGDQAKGKKPLFVQLILENIWSLYDAVLKKDKDKIDKIVTSLGLKIGAREARHSDPKVQINAICSQWLPISHAVLAMVCQKLPSPLDITAERVERLMCTGSQTFDSFPPETQALKAAFMKCGSEDTAPVIIFVSKMFAVDAKALPQNKPRPLTQEEIAQRRERARQRHAEKLAAAQGQAPLEPTQDGSAIETCPKGEEPRGDEQQVESMTPKPVLQEENNQESFIAFARVFSGVARRGKKIFVLGPKYSPLEFLRRVPLGFSAPPDGLPQVPHMAYCALENLYLLMGRELEYLEEVPPGNVLGIGGLQDFVLKSATLCSLPSCPPFIPLNFEATPIVRVAVEPKHPSEMPQLVKGMKLLNQADPCVQILIQETGEHVLVTAGEVHLQRCLDDLKERFAKIHISVSEPIIPFRETITKPPKVDMVNEEIGKQQKVAVIHQMKEDQSKIPEGIQVDSDGLITITTPNKLATLSVRAMPLPEEVTQILEENSDLIRSMEQLTSSLNEGENTHMIHQKTQEKIWEFKGKLEQHLTGRRWRNIVDQIWSFGPRKCGPNILVNKSEDFQNSVWTGPADKASKEASRYRDLGNSIVSGFQLATLSGPMCEEPLMGVCFVLEKWDLSKFEEQGASDLAKEGQEENETCSGGNENQELQDGCSEAFEKRTSQKGESPLTDCYGPFSGQLIATMKEACRYALQVKPQRLMAAMYTCDIMATGDVLGRVYAVLSKREGRVLQEEMKEGTDMFIIKAVLPVAESFGFADEIRKRTSGLASPQLVFSHWEIIPSDPFWVPTTEEEYLHFGEKADSENQARKYMNAVRKRKGLYVEEKIVEHAEKQRTLSKNK

SEQ ID NO: 776 - protein, 1460 aa, Homo sapiens
MAGRPLRIGDQLVLEEDYDETYIPSEQEILEFAREIGIDPIKEPELMWLAREGIVAPLPGEWKPCQDITGDIYYFNFANGQSMWDHPCDEHYRSLVIQERAKLSTSGAIKKKKKKKEKKDKKDRDPPKSSLALGSSLAPVHVPLGGLAPLRGLVDTPPSALRGSQSVSLGSSVESGRQLGELMLPSQGLKTSAYTKGLLGSIYEDKTALSLLGLGEETNEEDEEESDNQSVHSSSEPLRNLHLDIGALGGDFEYEESLRTSQPEEKKDVSLDSDAAGPPTPCKPSSPGADSSLSSAVGKGRQGSGARPGLPEKEENEKSEPKICRNLVTPKADPTGSEPAKASEKEAPEDTVDAGEEGSRREEAAKEPKKKASALEEGSSDASQELEISEHMKEPQLSDSIASDPKSFHGLDFGFRSRISEHLLDVDVLSPVLGGACRQAQQPLGIEDKDDSQSSQDELQSKQSKGLEERLSPPLPHEERAQSPPRSLATEEEPPQGPEGQPEWKEAEELGEDSAASLSLQLSLQREQAPSPPAACEKGKEQHSQAEELGPGQEEAEDPEEKVAVSPTPPVSPEVRSTEPVAPPEQLSEAALKAMEEAVAQVLEQDQRHLLESKQEKMQQLREKLCQEEEEEILRLHQQKEQSLSSLRERLQKAIEEEEARMREEESQRLSWLRAQVQSSTQADEDQIRAEQEASLQKLREELESQQKAERASLEQKNRQMLEQLKEEIEASEKSEQAALNAAKEKALQQLREQLEGERKEAVATLEKEHSAELERLCSSLEAKHREVVSSLQKKIQEAQQKEEAQLQKCLGQVEHRVHQKSYHVAGYEHELSSLLREKRQEVEGEHERRLDKMKEEHQQVMAKAREQYEAEERKQRAELLGHLTGELERLQRAHERELETVRQEQHKRLEDLRRRHREQERKLQDLELDLETRAKDVKARLALLEVQEETARREKQQLLDVQRQVALKSEEATATHQQLEEAQKEHTHLLQSNQQLREILDELQARKLKLESQVDLLQAQSQQLQKHFSSLEAEAQKKQHLLREVTVEENNASPHFEPDLHIEDLRKSLGTNQTKEVSSSLSQSKEDLYLDSLSSHNVWHLLSAEGVALRSAKEFLVQQTRSMRRRQTALKAAQQHWRHELASAQEVAKDPPGIKALEDMRKNLEKETRHLDEMKSAMRKGHNLLKKKEEKLNQLESSLWEEASDEGTLGGSPTKKAVTFDLSDMDSLSSESSESFSPPHREWWRQQRIDSTPSLTSRKIHGLSHSLRQISSQLSSVLSILDSLNPQSPPPLLASMPAQLPPRDPKSTPTPTYYGSLARFSALSSATPTSTQWAWDSGQGPRLPSSVAQTVDDFLLEKWRKYFPSGIPLLSNSPTPLESRLGYMSASEQLRLLQHSHSQVPEAGSTTFQGIIEANRRWLERVKNDPRLPLFSSTPKPKATLSLLQLGLDEHNRVKVYRF

SEQ ID NO: 777 - protein, 1826 aa, Homo sapiens
MGDSKVKVAVRIRPMNRRETDLHTKCVVDVDANKVILNPVNTNLSKGDARGQPKVFAYDHCFWSMDESVKEKYAGQDIVFKCLGENILQNAFDGYNACIFAYGQTGSGKSYTMMGTADQPGLIPRLCSGLFERTQKEENEEQSFKVEVSYMEIYNEKVRDLLDPKGSRQTLKVREHSVLGPYVDGLSKLAVTSYKDIESLMSEGNKSRTVAATNMNEESSRSHAVFKITLTHTLYDVKSGTSGEKVGKLSLVDLAGSERATKTGAAGDRLKEGSNINKSLTTLGLVISALADQSAGKNKNKFVPYRDSVLTWLLKDSLGGNSKTAMVATVSPAADNYDETLSTLRYADRAKHIVNHAVVNEDPNARIIRDLREEVEKLREQLTKAEAMKSPELKDRLEESEKLIQEMTVTWEEKLRKTEEIAQERQKQLESLGISLQSSGIKVGDDKCFLVNLNADPALNELLVYYLKEHTLIGSANSQDIQLCGMGILPEHCIIDITSEGQVMLTPQKNTRTFVNGSSVSSPIQLHHGDRILWGNNHFFRLNLPKKKKKAEREDEDQDPSMKNENSSEQLDVDGDSSSEVSSEVNFNYEYAQMEVTMKALGSNDPMQSILNSLEQQHEEEKRSALERQRLMYEHELEQLRRRLSPEKQNCRSMDRFSFHSPSAQQRLRQWAEEREATLNNSLMRLREQIVKANLLVREANYIAEELDKRTEYKVTLQIPASSLDANRKRGSLLSEPAIQVRRKGKGKQIWSLEKLDNRLLDMRDLYQEWKECEEDNPVIRSYFKRADPFYDEQENHSLIGVANVFLESLFYDVKLQYAVPIINQKGEVAGRLHVEVMRLSGDVGERIAGGDEVAEVSFEKETQENKLVCMVKILQATGLPQHLSHFVFCKYSFWDQQEPVIVAPEVDTSSSSVSKEPHCMVVFDHCNEFSVNITEDFIEHLSEGALAIEVYGHKINDPRKNPALWDLGIIQAKTRSLRDRWSEVTRKLEFWVQILEQNENGEYCPVEVISAKDVPTGGIFQLRQGQSRRVQVEVKSVQESGTLPLMEECILSVGIGCVKVRPLRAPRTHETFHEEEEDMDSYQDRDLERLRRKWLNALTKRQEYLDQQLQKLVSKRDKTEDDADREAQLLEMRLTLTEERNAVMVPSAGSGIPGAPAEWTPVPGMETHIPVIFLDLNADDFSSQDNLDDPEAGGWDATLTGEEEEEFFELQIVKQHDGEVKAEASWDSAVHGCPQLSRGTPVDERLFLIVRVTVQLSHPADMQLVLRKRICVNVHGRQGFAQSLLKKMSHRSSIPGCGVTFEIVSNIPEDAQGVEEREALARMAANVENPASADSEAYIEKYLRSVLAVENLLTLDRLRQEVAVKEQLTGKGKLSRRSISSPNVNRLSGSRQDLIPSYSLGSNKGRWESQQDVSQTTVSRGIAPAPALSVSPQNNHSPDPGLSNLAASYLNPVKSFVPQMPKLLKSLFPVRDEKRGKRPSPLAHQPVPRIMVQSASPDIRVTRMEEAQPEMGPDVLVQTMGAPALKICDKPAKVPSPPPVIAVTAVTPAPEAQDGPPSPLSEASSGYFSHSVSTATLSDALGPGLDAAAPPGSMPTAPEAEPEAPISHPPPPTAVPAEEPPGPQQLVSPGRERPDLEAPAPGSPFRVRRVRASELRSFSRMLAGDPGCSPGAEGNAPAPGAGGQALASDSEEADEVPEWLREGEFVTVGAHKTGVVRYVGPADFQEGTWVGVELDLPSGKNDGSIGGKQYFRCNPGYGLLVRPSRVRRATGPVRRRSTGLRLGAPEARRSATLSGSATNLASLTAALAKADRSHKNPENRKSWAS

SEQ ID NO: 778 - protein, 893 aa, Homo sapiens
MATEEFIIRIPPYHYIHVLDQNSNVSRVEVGPKTYIRQDNERVLFAPMRMVTVPPRHYCTVANPVSRDAQGLVLFDVTGQVRLRHADLEIRLAQDPFPLYPGEVLEKDITPLQVVLPNTALHLKALLDFEDKDGDKVVAGDEWLFEGPGTYIPRKEVEVVEIIQATIIRQNQALRLRARKECWDRDGKERVTGEEWLVTTVGAYLPAVFEEVLDLVDAVILTEKTALHLRARRNFRDFRGVSRRTGEEWLVTVQDTEAHVPDVHEEVLGVVPITTLGPHNYCVILDPVGPDGKNQLGQKRVVKGEKSFFLQPGEQLEQGIQDVYVLSEQQGLLLRALQPLEEGEDEEKVSHQAGDHWLIRGPLEYVPSAKVEVVEERQAIPLDENEGIYVQDVKTGKVRAVIGSTYMLTQDEVLWEKELPPGVEELLNKGQDPLADRGEKDTAKSLQPLAPRNKTRVVSYRVPHNAAVQVYDYREKRARVVFGPELVSLGPEEQFTVLSLSAGRPKRPHARRALCLLLGPDFFTDVITIETADHARLQLQLAYNWHFEVNDRKDPQETAKLFSVPDFVGDACKAIASRVRGAVASVTFDDFHKNSARIIRTAVFGFETSEAKGPDGMALPRPRDQAVFPQNGLVVSSVDVQSVEPVDQRTRDALQRSVQLAIEITTNSQEAAAKHEAQRLEQEARGRLERQKILDQSEAEKARKELLELEALSMAVESTGTAKAEAESRAEAARIEGEGSVLQAKLKAQALAIETEAELQRVQKVRELELVYARAQLELEVSKAQQLAEVEVKKFKQMTEAIGPSTIRDLAVAGPEMQVKLLQSLGLKSTLITDGSTPINLFNTAFGLLGMGPEGQPLGRRVASGPSPGEGISPQSAQAPQAPGDNHVVPVLR

SEQ ID NO: 779 - protein, 1392 aa, Homo sapiens
MSMLKPSGLKAPTKILKPGSTALKTPTAVVAPVEKTISSEKASSTPSSETQEEFVDDFRVGERVWVNGNKPGFIQFLGETQFAPGQWAGIVLDEPIGKNDGSVAGVRYFQCEPLKGIFTRPSKLTRKVQAEDEANGLQTTPASRATSPLCTSTASMVSSSPSTPSNIPQKPSQPAAKEPSATPPISNLTKTASESISNLSEAGSIKKGERELKIGDRVLVGGTKAGVVRFLGETDFAKGEWCGVELDEPLGKNDGAVAGTRYFQCQPKYGLFAPVHKVTKIGFPSTTPAKAKANAVRRVMATTSASLKRSPSASSLSSMSSVASSVSSRPSRTGLLTETSSRYARKISGTTALQEALKEKQQHIEQLLAERDLERAEVAKATSHVGEIEQELALARDGHDQHVLELEAKMDQLRTMVEAADREKVELLNQLEEEKRKVEDLQFRVEEESITKGDLEVATVSEKSRIMELEKDLALRVQEVAELRRRLESNKPAGDVDMSLSLLQEISSLQEKLEVTRTDHQREITSLKEHFGAREETHQKEIKALYTATEKLSKENESLKSKLEHANKENSDVIALWKSKLETAIASHQQAMEELKVSFSKGLGTETAEFAELKTQIEKMRLDYQHEIENLQNQQDSERAAHAKEMEALRAKLMKVIKEKENSLEAIRSKLDKAEDQHLVEMEDTLNKLQEAEIKVKELEVLQAKCNEQTKVIDNFTSQLKATEEKLLDLDALRKASSEGKSEMKKLRQQLEAAEKQIKHLEIEKNAESSKASSITRELQGRELKLTNLQENLSEVSQVKETLEKELQILKEKFAEASEEAVSVQRSMQETVNKLHQKEEQFNMLSSDLEKLRENLADMEAKFREKDEREEQLIKAKEKLENDIAEIMKMSGDNSSQLTKMNDELRLKERDVEELQLKLTKANENASFLQKSIEDMTVKAEQSQQEAAKKHEEEKKELERKLSDLEKKMETSHNQCQELKARYERATSETKTKHEEILQNLQKTLLDTEDKLKGAREENSGLLQELEELRKQADKAKAAQTAEDAMQIMEQMTKEKTETLASLEDTKQTNAKLQNELDTLKENNLKNVEELNKSKELLTVENQKMEEFRKEIETLKQAAAQKSQQLSALQEENVKLAEELGRSRDEVTSHQKLEEERSVLNNQLLEMKKRESKFIKDADEEKASLQKSISITSALLTEKDAELEKLRNEVTVLRGENASAKSLHSVVQTLESDKVKLELKVKNLELQLKENKRQLSSSSGNTDTQADEDERAQESQIDFLNSVIVDLQRKNQDLKMKVEMMSEAALNGNGDDLNNYDSDDQEKQSKKKPRLFCDICDCFDLHDTEDCPTQAQMSEDPPHSTHHGSRGEERPYCEICEMFGHWATNCNDDETF

SEQ ID NO: 780 - protein, 344 aa, Homo sapiens
MGPPSAPPCRLHVPWKEVLLTASLLTFWNPPTTAKLTIESTPFNVAEGKEVLLLAHNLPQNRIGYSWYKGERVDGNSLIVGYVIGTQQATPGPAYSGRETIYPNASLLIQNVTQNDTGFYTLQVIKSDLVNEEATGQFHVYPELPKPSISSNNSNPVEDKDAVAFTCEPEVQNTTYLWWVNGQSLPVSPRLQLSNGNMTLTLLSVKRNDAGSYECEIQNPASANRSDPVTLNVLYGPDGPTISPSKANYRPGENLNLSCHAASNPPAQYSWFINGTFQQSTQELFIPNITVNNSGSYMCQAHNSATGLNRTTVTMITVSGSAPVLSAVATVGITIGVLARVALI

SEQ ID NO: 781 - protein, 483 aa, Homo sapiens
MSIRVTQKSYKVSTSGPRAFSSRSYTSGPGSRISSSSFSRVGSSNFRGGLGGGYGGASGMGGITAVTVNQSLLSPLVLEVDPNIQAVRTQEKEQIKTLNNKFASFIDKVRFLEQQNKMLETKWSLLQQQKTARSNMDNMFESYINNLRRQLETLGQEKLKLEAELGNMQGLVEDFKNKYEDEINKRTEMENEFVLIKKDVDEAYMNKVELESRLEGLTDEINFLRQLYEEEIRELQSQISDTSVVLSMDNSRSLDMDSIIAEVKAQYEDIANRSRAEAESMYQIKYEELQSLAGKHGDDLRRTKTEISEMNRNISRLQAEIEGLKGQRASLEAAIADAEQRGELAIKDANAKLSELEAALQRAKQDMARQLREYQELMNVKLALDIEIATYRKLLEGEESRLESGMQNMSIHTKTTSGYAGGLSSAYGGLTSPGLSYSLGSSFGSGAGSSSFSRTSSSRAVVVKKIETRDGKLVSESSDVLPK

SEQ ID NO: 782 - protein, 132 aa, Homo sapiens
MAFDSTWKVDRSENYDKFMEKMGVNIVKRKLAAHDNLKLTITQEGNKFTVKESSTFRNIEVVFELGVTFNYNLADGTELRGTWSLEGNKLIGKFKRTDNGNELNTVREIIGDELVQTYVYEGVEAKRIFKKD

SEQ ID NO: 783 - protein, 1497 aa, Homo sapiens
MSRAVRLPVPCPVQLGTLRNDSLEAQLHEYVKQGNYVKVKKILKKGIYVDAVNSLGQTALFVAALLGLRKFVDVLVDYGSDPNHRCFDGSTPVHAAAFSGNQWILSKLLDAGGDLRLHDERGQNPKTWALTAGKERSTQIVEFMQRCASHMQAIIQGFSYDLLKKIDSPQRLVYSPSWCGGLVQGNPNGSPNRLLKAGVISAQNIYSFGFGKAMPWFQFYLTGATQMAYLGSLPVIGEKEVIQADDEPTFSFFSGPYMVMTNLVWNGSRVTVKELNLPTHPHCSRLRLADLLIAEQEHSSKLRHPYLLQLMAVCLSQDLEKTRLVYERITIGTLFSVLHERRSQFPVLHMEVIVHLLLQISDALRYLHFQGFIHRSLSSYAVHIISPGEARLTNLEYMLESEDRGVQRDLTRVPLPTQLYNWAAPEVILQKAATVKSDIYSFSMIMQEILTDDIPWKGLDGSVVKKAVVSGNYLEADVRLPKPYYDIVKSGIHVKQKDRTMNLQDIRYILKNDLKDFTGAQRTQPTESPRVQRYGLHPDVNVYLGLTSEHPRETPDMEIIELKEMGSQPHSPRVHSLFTEGTLDPQAPDPCLMARETQNQDAPCPAPFMAEEASSPSTGQPSLCSFEINEIYSGCLILEDDIEEPPGAASSLEADGPNQVDELKSMEEELDKMEREACCFGSEDESSSKAETEYSFDDWDWQNGSLSSLSLPESTREAKSNLNNMSTTEEYLISKCVLDLKIMQTIMHENDDRLRNIEQILDEVEMKQKEQEERMSLWATSREFTNAYKLPLAVGPPSLNYIPPVLQLSGGQKPDTSGNYPTLPRFPRMLPTLCDPGKQNTDEQFQCTQGAKDSLETSRIQNTSSQGRPRESTAQAKATQFNSALFTLSSHRQGPSASPSCHWDSTRMSVEPVSSEIYNAESRNKDDGKVHLKWKMEVKEMAKKAATGQLTVPPWHPQSSLTLESEAENEPDALLQPPIRSPENTDWQRVIEYHRENDEPRGNGKFDKTGNNDCDSDQHGRQPRLGSFTSIRHPSPRQKEQPEHSEAFQASSDTLVAVEKSYSHQSMQSTCSPESSEDITDEFLTPDGEYFYSSTAQENLALETSSPIEEDFEGIQGAFAQPQVSGEEKFQMRKILGKNAEILPRSQFQPVRSTEDEQEETSKESPKELKEKDISLTDIQDLSSISYEPDSSFKEASCKTPKINHAPTSVSTPLSPGSVSSAASQYKDCLESITFQVKTEFASCWNSQEFIQTLSDDFISVRERAKKLDSLLTSSETPPSRLTGLKRLSSFIGAGSPSLVKACDSSPPHATQRRSLPKVEAFSQHHIDELPPPSQELLDDIELLKQQQGSSTVLHENTASDGGGTANDQRHLEEQETDSKKEDSSMLLSKETEDLGEDTERAHSTLDEDLERWLQPPEESVELQDLPKGSERETNIKDQKVGEEKRKREDSITPERRKSEGVLGTSEEDELKSCFWKRLGWSESSRIIVLDQSDLSD

SEQ ID NO: 784 - protein, 1642 aa, Homo sapiens
MSSFKRGSLKSSTSGSQKGQKSWIEKTFCKRECIFVIPSMKDSNRCCCGQFTNQHIPPLPSATPSKNEEESKQVETQPEKWSVAKHTQSYPTDSYGVLEFQGGGYSNKAMYIRVSYDTKPDSLLHLMVKDWQLELPKLLISVHGGLQNFEMQPKLKQVFGKGLIKAAMTTGAWIFTGGVSTGVISHVGDALKDHSSKSRGRVCAIGIAPWGIVENKEDLVGKDVTRVYQTMSNPLSKLSVLNNSHTHFILADNGTLGKYGAEVKLRRLLEKHISLQKINTRLGQGVPLVGLVVEGGPNVVSIVLEYLQEEPPIPVVICDGSGRASDILSFAHKYCEEGGIINESLREQLLVTIQKTFNYNKAQSHQLFAIIMECMKKKELVTVFRMGSEGQQDIEMAILTALLKGTNVSAPDQLSLALAWNRVDIARSQIFVFGPHWPPLGSLAPPTDSKATEKEKKPPMATTKGGRGKGKGKKKGKVKEEVEEETDPRKIELLNWVNALEQAMLDALVLDRVDFVKLLIENGVNMQHFLTIPRLEELYNTRLGPPNTLHLLVRDVKKSNLPPDYHISLIDIGLVLEYLMGGAYRCNYTRKNFRTLYNNLFGPKRPKALKLLGMEDDEPPAKGKKKKKKKKEEEIDIDVDDPAVSRFQYPFHELMVWAVLMKRQKMAVFLWQRGEESMAKALVACKLYKAMAHESSESDLVDDISQDLDNNSKDFGQLALELLDQSYKHDEQIAMKLLTYELKNWSNSTCLKLAVAAKHRDFIAHTCSQMLLTDMWMGRLRMRKNPGLKVIMGILLPPTILFLEFRTYDDFSYQTSKENEDGKEKEEENTDANADAGSRKGDEENEHKKQRSIPIGTKICEFYNAPIVKFWFYTISYLGYLLLFNYVILVRMDGWPSLQEWIVISYIVSLALEKIREILMSEPGKLSQKIKVWLQEYWNITDLVAISTFMIGAILRLQNQPYMGYGRVIYCVDIIFWYIRVLDIFGVNKYLGPYVMMIGKMMIDMLYFVVIMLVVLMSFGVARQAILHPEEKPSWKLARNIFYMPYWMIYGEVFADQIDLYAMEINPPCGENLYDEEGKRLPPCIPGAWLTPALMACYLLVANILLVNLLIAVFNNTFFEVKSISNQVWKFQRYQLIMTFHDRPVLPPPMIILSHIYIIIMRLSGRCRKKREGDQEERDRGLKLFLSDEELKRLHEFEEQCVQEHFREKEDEQQSSSDERIRVTSERVENMSMRLEEINERETFMKTSLQTVDLRLAQLEELSNRMVNALENLAGIDRSDLIQARSRASSECEATYLLRQSSINSADGYSLYRYHFNGEELLFEDTSLSTSPGTGVRKKTCSFRIKEEKDVKTHLVPECQNSLHLSLGTSTSATPDGSHLAVDDLKNAEESKLGPDIGISKEDDERQTDSKKEETISPSLNKTDVIHGQDKSDVQNTQLTVETTNIEGTISYPLEETKITRYFPDETINACKTMKSRSFVYSRGRKLVGGVNQDVEYSSITDQQLTTEWQCQVQKITRSHSTDIPYIVSEAAVQAEHKEQFADMQDEHHVAEAIPRIPRLSLTITDRNGMENLLSVKPDQTLGFPSLRSKSLHGHPRNVKSIQGKLDRSGHASSVSSLVIVSGMTAEEKKVKKEKASTETEC

SEQ ID NO: 785 - protein, 1439 aa, Homo sapiens
MASSETEIRWAEPGLGKGPQRRRWAWAEDKRDVDRSSSQSWEEERLFPNATSPELLEDFRLAQQHLPPLEWDPHPQPDGHQDSESGETSGEEAEAEDVDSPASSHEPLAWLPQQGRQLDMTEEEPDGTLGSLEVEEAGESSSRLGYEAGLSLEGHGNTSPMALGHGQARGWVASGEQASGDKLSEHSEVNPSVELSPARSWSSGTVSLDHPSDSLDSTWEGETDGPQPTALAETLPEGPSHHLLSPDGRTGGSVARATPMEFQDSSAPPAQSPQHATDRWRRETTRFFCPQPKEHIWKQTKTSPKPLPSRFIGSISPLNPQPRPTRQGRPLPRQGATLAGRSSSNAPKYGRGQLNYPLPDFSKVGPRVRFPKDESYRPPKSRSHNRKPQAPARPLIFKSPAEIVQEVLLSSGEAALAKDTPPAHPITRVPQEFQTPEQATELVHQLQEDYHRLLTKYAEAENTIDQLRLGAKVNLFSDPPQPNHSIHTGMVPQGTKVLSFTIPQPRSAEWWPGPAEDPQASAASGWPSARGDLSPSSLTSMPTLGWLPENRDISEDQSSAEQTQALASQASQFLAKVESFERLIQAGRLMPQDQVKGFQRLKAAHAALEEEYLKACREQHPAQPLAGSKGTPGRFDPRRELEAEIYRLGSCLEELKEHIDQTQQEPEPPGSDSALDSTPALPCLHQPTHLPAPSGQAPMPAIKTSCPEPATTTAAASTGPCPLHVNVEVSSGNSEVEDRPQDPLARLRHKELQMEQVYHGLMERYLSVKSLPEAMRMEEEEEGEEEEEEEGGGDSLEVDGVAATPGKAEATRVLPRQCPVQAEKSHGAPLEEATEKMVSMKPPGFQASLARDGHMSGLGKAEAAPPGPGVPPHPPGTKSAASHQSSMTSLEGSGISERLPQKPLHRGGGPHLEETWMASPETDSGFVGSETSRVSPLTQTPEHRLSHISTAGTLAQPFAASVPRDGASYPKARGSLIPRRATEPSTPRSQAQRYLSSPSGPLRQRAPNFSLERTLAAEMAVPGSEFEGHKRISEQPLPNKTISPPPAPAPAAAPLPCGPTETIPSFLLTRAGRDQAICELQEEVSRLRLRLEDSLHQPLQGSPTRPASAFDRPARTRGRPADSPATWGSHYGSKSTERLPGEPRGEEQIVPPGRQRARSSSVPREVLRLSLSSESELPSLPLFSEKSKTTKDSPQAARDGKRGVGSAGWPDRVTFRGQYTGHEYHVLSPKAVPKGNGTVSCPHCRPIRTQDAGGAVTGDPLGPPPADTLQCPLCGQVGSPPEADGPGSATSGAEKATTRRKASSTPSPKQRSKQAGSSPRPPPGLWYLATAPPAPAPPAFAYISSVPIMPYPPAAVYYAPAGPTSAQPAAKWPPTASPPPARRHRHSIQLDLGDLEELNKALSRAVQAAESVRSTTRQMRSSLSADLRQAHSLRGSCLF

SEQ ID NO: 786 - protein, 1401 aa, Homo sapiens
MASCASIDIEDATQHLRDILKLDRPAGGPSAESPRPSSAYNGDLNGLLVPDPLCSGDSTSANKTGLRTMPPINLQEKQVICLSGDDSSTCIGILAKEVEIVASSDSSISSKARGSNKVKIQPVAKYDWEQKYYYGNLIAVSNSFLAYAIRAANNGSAMVRVISVSTSERTLLKGFTGSVADLAFAHLNSPQLACLDEAGNLFVWRLALVNGKIQEEILVHIRQPEGTPLNHFRRIIWCPFIPEESEDCCEESSPTVALLHEDRAEVWDLDMLRSSHSTWPVDVSQIKQGFIVVKGHSTCLSEGALSPDGTVLATASHDGYVKFWQIYIEGQDEPRCLHEWKPHDGRPLSCLLFCDNHKKQDPDVPFWRFLITGADQNRELKMWCTVSWTCLQTIRFSPDIFSSVSVPPSLKVCLDLSAEYLILSDVQRKVLYVMELLQNQEEGHACFSSISEFLLTHPVLSFGIQVVSRCRLRHTEVLPAEEENDSLGADGTHGAGAMESAAGVLIKLFCVHTKALQDVQIRFQPQLNPDVVAPLPTHTAHEDFTFGESRPELGSEGLGSAAHGSQPDLRRIVELPAPADFLSLSSETKPKLMTPDAFMTPSASLQQITASPSSSSSGSSSSSSSSSSSLTAVSAMSSTSAVDPSLTRPPEELTLSPKLQLDGSLTMSSSGSLQASPRGLLPGLLPAPADKLTPKGPGQVPTATSALSLELQEVEPLGLPQASPSRTRSPDVISSASTALSQDIPEIASEALSRGFGSSAPEGLEPDSMASAASALHLLSPRPRPGPELGPQLGLDGGPGDGDRHNTPSLLEAALTQEASTPDSQVWPTAPDITRETCSTLAESPRNGLQEKHKSLAFHRPPYHLLQQRDSQDASAEQSDHDDEVASLASASGGFGTKVPAPRLPAKDWKTKGSPRTSPKLKRKSKKDDGDAAMGSRLTEHQVAEPPEDWPALIWQQQRELAELRHSQEELLQRLCTQLEGLQSTVTGHVERALETRHEQEQRRLERALAEGQQRGGQLQEQLTQQLSQALSSAVAGRLERSIRDEIKKTVPPCVSRSLEPMAGQLSNSVATKLTAVEGSMKENISKLLKSKNLTDAIARAAADTLQGPMQAAYREAFQSVVLPAFEKSCQAMFQQINDSFRLGTQEYLQQLESHMKSRKAREQEAREPVLAQLRGLVSTLQSATEQMAATVAGSVRAEVQHQLHVAVGSLQESILAQVQRIVKGEVSVALKEQQAAVTSSIMQAMRSAAGTPVPSAHLDCQAQQAHILQLLQQGHLNQAFQQALTAADLNLVLYVCETVDPAQVFGQPPCPLSQPVLLSLIQQLASDLGTRTDLKLSYLEEAVMHLDHSDPITRDHMGSVMAQVRQKLFQFLQAEPHNSLGKAARRLSLMLHGLVTPSLP

SEQ ID NO: 787 - protein, 1547 aa, Homo sapiens
MGTALLQRGGCFLLCLSLLLLGCWAELGSGLEFPGAEGQWTRFPKWNACCESEMSFQLKTRSARGLVLYFDDEGFCDFLELILTRGGRLQLSFSIFCAEPATLLADTPVNDGAWHSVRIRRQFRNTTLFIDQVEAKWVEVKSKRRDMTVFSGLFVGGLPPELRAAALKLTLASVREREPFKGWIRDVRVNSSQVLPVDSGEVKLDDEPPNSGGGSPCEAGEEGEGGVCLNGGVCSVVDDQAVCDCSRTGFRGKDCSQEIKFGLQCVLPVLLHDNDQGKYCCINTAKPLTEKDNNVEGLAHLMMGDQGKSKGKEEYIATFKGSEYFCYDLSQNPIQSSSDEITLSFKTLQRNGLMLHTGKSADYVNLALKNGAVSLVINLGSGAFEALVEPVNGKFNDNAWHDVKVTRNLRQHSGIGHAMVNKLHCSVTISVDGILTTTGYTQEDYTMLGSDDFFYVGGSPSTADLPGSPVSNNFMGCLKEVVYKNNDVRLELSRLAKQGDPKMKIHGVVAFKCENVATLDPITFETPESFISLPKWNAKKTGSISFDFRTTEPNGLILFSHGKPRHQKDAKHPQMIKVDFFAIEMLDGHLYLLLDMGSGTIKIKALLKKVNDGEWYHVDFQRDGRSGTISVNTLRTPYTAPGESEILDLDDELYLGGLPENKAGLVFPTEVWTALLNYGYVGCIRDLFIDGQSKDIRQMAEVQSTAGVKPSCSKETAKPCLSNPCKNNGMCRDGWNRYVCDCSGTGYLGRSCEREATVLSYDGSMFMKIQLPVVMHTEAEDVSLRFRSQRAYGILMATTSRDSADTLRLELDAGRVKLTVNLDCIRINCNSSKGPETLFAGYNLNDNEWHTVRVVRRGKSLKLTVDDQQAMTGQMAGDHTRLEFHNIETGIITERRYLSSVPSNFIGHLQSLTFNGMAYIDLCKNGDIDYCELNARFGFRNIIADPVTFKTKSSYVALATLQAYTSMHLFFQFKTTSLDGLILYNSGDGNDFIVVELVKGYLHYVFDLGNGANLIKGSSNKPLNDNQWHNVMISRDTSNLHTVKIDTKITTQITAGARNLDLKSDLYIGGVAKETYKSLPKLVHAKEGFQGCLASVDLNGRLPDLISDALFCNGQIERGCEGPSTTCQEDSCSNQGVCLQQWDGFSCDCSMTSFSGPLCNDPGTTYIFSKGGGQITYKWPPNDRPSTRADRLAIGFSTVQKEAVLVRVDSSSGLGDYLELHIHQGKIGVKFNVGTDDIAIEESNAIINDGKYHVVRFTRSGGNATLQVDSWPVIERYPAGNNDNERLAIARQRIPYRLGRVVDEWLLDKGRQLTIFNSQATIIIGGKEQGQPFQGQLSGLYYNGLKVLNMAAENDANIAIVGNVRLVGEVPSSMTTESTATAMQSEMSTSIMETTTTLATSTARRGKPPTKEPISQTTDDILVASAECPSDDEDIDPCEPSSGGLANPTRAGGREPYPGSAEVIRESSSTTGMVVGIVAAAALCILILLYAMYKYRNRDEGSYHVDESRNYISNSAQSNGAVVKEKQPSSAKSSNKNKKNKDKEYYV

SEQ ID NO: 788 - protein, 1700 aa, Homo sapiens
MDGNSLLSVPSNLESSRMYDVLEPQQGRGCGSSGSGPGNSITACKKVLRSNSLLESTDYWLQNQRMPCQIGFVEDKSENCASVCFVNLDVNKDECSTEHLQQKLVNVSPDLPKLISSMNVQQPKENEIVVLSGLASGNLQADFEVSQCPWLPDICLVQCARGNRPNSTNCIIFEINKFLIGLELVQERQLHLETNILKLEDDTNCSLSSIEEDFLTASEHLEEESEVDESRNDYENINVSANVLESKQLKGATQVEWNCNKEKWLYALEDKYINKYPTPLIKTERSPENLTKNTALQSLDPSAKPSQWKREAVGNGRQATHYYHSEAFKGQMEKSQALYIPKDAYFSMMDKDVPSACAVAEQRSNLNPGDHEDTRNALPPRQDGEVTTGKYATNLAESVLQDAFIRLSQSQSTLPQESAVSVSVGSSLLPSCYSTKDTVVSRSWNELPKIVVVQSPDGSDAAPQPGISSWPEMEVSVETSSILSGENSSRQPQSALEVALACAATVIGTISSPQATERLKMEQVVSNFPPGSSGALQTQAPQGLKEPSINEYSFPSALCGMTQVASAVAVCGLGEREEVTCSVAPSGSLPPAAEASEAMPPLCGLASMELGKEAIAKGLLKEAALVLTRPNTYSSIGDFLDSMNRRIMETASKSQTLCSENVVRNELAHTLSNVILRHSIDEVHHKNMIIDPNDNRHSSEILDTLMESTNQLLLDVICFTFKKMSHIVRLGECPAVLSKETIRRRETEPSCQPSDPGASQAWTKATESSSSSPLSNSHNTSLVINNLVDGMYSKQDKGGVRPGLFKNPTLQSQLSRSHRVPDSSTATTSSKEIYLKGIAGEDTKSPHHSENECRASSEGQRSPTVSQSRSGSQEAEESIHPNTQEKYNCATSRINEVQVNLSLLGDDLLLPAQSTLQTKHPDIYCITDFAEELADTVVSMATEIAAICLDNSSGKQPWFCAWKRGSEFLMTPNVPCRSLKRKKESQGSGTAVRKHKPPRLSEIKRKTDEHPELKEKLMNRVVDESMNLEDVPDSVNLFANEVAAKIMNLTEFSMVDGMWQAQGYPRNRLLSGDRWSRLKASSCESIPEEDSEARAYVNSLGLMSTLSQPVSRASSVSKQSSCESITDEFSRFMVNQMENEGRGFELLLDYYAGKNASSILNSAMQQACRKSDHLSVRPSCPSKQSSTESITEEFYRYMLRDIERDSRESASSRRSSQDWTAGLLSPSLRSPVCHRQSSMPDSRSPCSRLTVNVPIKANSLDGFAQNCPQDFLSVQPVSSASSSGLCKSDSCLYRRGGTDHITNMLIHETWASSIEALMRKNKIIVDDAEEADTEPVSGGSPSQAEKCANRLAASRMCSGPTLLVQESLDCPRKDSVTECKQPPVSSLSKTASLTNHSPLDSKKETSSCQDPVPINHKRRSLCSREVPLIQIETDQREACAGEPEPFLSKSSLLEEAEGHSNDKNIPDVVRGGDTAVSACQIHSDSLDTRDVPEAEASTEARAPDEAPNPPSSSEESTGSWTQLANEEDNPDDTSSFLQLSERSMSNGNSSATSSLGIMDLDIYQESMPSSPMINELVEEKKILKGQSESTEAPASGPPTGTASPQRSLLVINFDLEPECPDAELRATLQWIAASELGIPTIYFKKSQENRIEKFLDVVQLVHRKSWKVGDIFHAVVQYCKMHEEQKDGRLSLFDWLLELG

SEQ ID NO: 789 - protein, 1602 aa, Homo sapiens
MGSKRRRATSPSSSVSGDFDDGHHSVSTPGPSRKRRRLSNLPTVDPIAVCHELYNTIRDYKDEQGRLLCELFIRAPKRRNQPDYYEVVSQPIDLMKIQQKLKMEEYDDVNLLTADFQLLFNNAKSYYKPDSPEYKAACKLWDLYLRTRNEFVQKGEADDEDDDEDGQDNQGTVTEGSSPAYLKEILEQLLEAIVVATNPSGRLISELFQKLPSKVQYPDYYAIIKEPIDLKTIAQRIQNGSYKSIHAMAKDIDLLAKNAKTYNEPGSQVFKDANSIKKIFYMKKAEIEHHEMAKSSLRMSNKRAVQGGRLSAITMALQYGSESEEDAALAAARYEEGESEAESITSFMDVSNPFYQLYDTVRSCRNNQGQLIAEPFYHLPSKKKYPDYYQQIKMPISLQQIRTKLKNQEYETLDHLECDLNLMFENAKRYNVPNSAIYKRVLKLQQVMQAKKKELARRDDIEDGDSMISSATSDTGSAKRKSKKNIRKQRMKILFNVVLEAREPGSGRRLCDLFMVKPSKKDYPDYYKIILEPMDLKIIEHNIRNDKYAGEEGMIEDMKLMFRNARHYNEEGSQVYNDAHILEKLLKEKRKELGPLPDDDDMASPKLKLSRKSGISPKKSKYMTPMQQKLNEVYEAVKNYTDKRGRRLSAIFLRLPSRSELPDYYLTIKKPMDMEKIRSHMMANKYQDIDSMVEDFVMMFNNACTYNEPESLIYKDALVLHKVLLETRRDLEGDEDSHVPNVTLLIQELIHNLFVSVMSHQDDEGRCYSDSLAEIPAVDPNFPNKPPLTFDIIRKNVENNRYRRLDLFQEHMFEVLERARRMNRTDSEIYEDAVELQQFFIKIRDELCKNGEILLSPALSYTTKHLHNDVEKERKEKLPKEIEEDKLKREEEKREAEKSEDSSGAAGLSGLHRTYSQDCSFKNSMYHVGDYVYVEPAEANLQPHIVCIERLWEDSAGEKWLYGCWFYRPNETFHLATRKFLEKEVFKSDYYNKVPVSKILGKCVVMFVKEYFKLCPENFRDEDVFVCESRYSAKTKSFKKIKLWTMPISSVRFVPRDVPLPVVRVASVFANADKGDDEKNTDNSEDSRAEDNFNLEKEKEDVPVEMSNGEPGCHYFEQLHYNDMWLKVGDCVFIKSHGLVRPRVGRIEKVWVRDGAAYFYGPIFIHPEETEHEPTKMFYKKEVFLSNLEETCPMTCILGKCAVLSFKDFLSCRPTEIPENDILLCESRYNESDKQMKKFKGLKRFSLSAKVVDDEIYYFRKPIVPQKEPSPLLEKKIQLLEAKFAELEGGDDDIEEMGEEDSEVIEPPSLPQLQTPLASELDLMPYTPPQSTPKSAKGSAKKEGSKRKINMSGYILFSSEMRAVIKAQHPDYSFGELSRLVGTEWRNLETAKKAEYEGMMGGYPPGLPPLQGPVDGLVSMGSMQPLHPGGPPPHHLPPGVPGLPGIPPPGVMNQGVAPMVGTPAPGGSPYGQQVGVLGPPGQQAPPPYPGPHPAGPPVIQQPTTPMFVAPPPKTQRLLHSEAYLKYIEGLSAESNSISKWDQTLAARRRDVHLSKEQESRLPSHWLKSKGAHTTMADALWRLRDLMLRDTLNIRQAYNLENV

SEQ ID NO: 790 - protein, 2517 aa, Homo sapiens
MVGERHAGDLMVPLGPRLQAYPEELIRQRPGHDGHPEYLIRWSVLKCGEVGKVGVEEGKAEHILMWLSAPEVYANCPGLLGERALSKGLQHEPAGVSGSFPRDPGGLDEVAMGEMEADVQALVRRAARQLAESGTPSLTAAVLHTIHVLSAYASIGPLTGVFRETGALDLLMHMLCNPEPQIRRSAGKMLQALAAHDAGSRAHVLLSLSQQDGIEQHMDFDSRYTLLELFAETTSSEEHCMAFEGIHLPQIPGKLLFSLVKRYLCVTSLLDQLNSSPELGAGDQSSPCATREKSRGQRELEFSMAVGNLISELVRSMGWARNLSEQGMSPPRPTRSIFQPYISGPSLLLPTIVTTPRRQGWVFRQRSEFSSRSGYGEYVQQTLQPGMRVRMLDDYEEISAGDEGEFRQSNNGIPPVQVFWQSTGRTYWVHWHMLEILGPEEATEDKASAAVEKGAGATVLGTAFPSWDWNPMDGLYPLPYLQPEPQKNERVGYLTQAEWWELLFFIKKLDLCEQQPIFQNLWKNLDETLGEKALGEISVSVEMAESLLQVLSSRFEGSTLNDLLNSQIYTKYGLLSNEPSSSSTSRNHSCTPDPEEESKSEASFSEEETESLKAKAEAPKTEAEPTKTRTETPMAQSDSQLFNQLLVTEGMTLPTEMKEAASEMARALRGPGPRSSLDQHVAAVVATVQISSLDTNLQLSGLSALSQAVEEVTERDHPLVRPDRSLREKLVKMLVELLTNQVGEKMVVVQALRLLYLLMTKHEWRPLFAREGGIYAVLVCMQEYKTSVLVQQAGLAALKMLAVASSSEIPTFVTGRDSIHSLFDAQMTREIFASIDSATRPGSESLLLTVPAAVILMLNTEGCSSAARNGLLLLNLLLCNHHTLGDQIITQELRDTLFRHSGIAPRTEPMPTTRTILMMLLNRYSEPPGSPERAALETPIIQGQDGSPELLIRSLVGGPSAELLLDLERVLCREGSPGGAVRPLLKRLQQETQPFLLLLRTLDAPGPNKTLLLSVLRVITRLLDFPEAMVLPWHEVLEPCLNCLSGPSSDSEIVQELTCFLHRLASMHKDYAVVLCCLGAKEILSKVLDKHSAQLLLGCELRDLVTECEKYAQLYSNLTSSILAGCIQMVLGQIEDHRRTHQPINIPFFDVFLRHLCQGSSVEVKEDKCWEKVEVSSNPHRASKLTDHNPKTYWESNGSTGSHYITLHMHRGVLVRQLTLLVASEDSSYMPARVVVFGGDSTSCIGTELNTVNVMPSASRVILLENLNRFWPIIQIRIKRCQQGGIDTRVRGVEVLGPKPTFWPLFREQLCRRTCLFYTIRAQAWSRDIAEDHRRLLQLCPRLNRVLRHEQNFADRFLPDDEAAQALGKTCWEALVSPLVQNITSPDAEGVSALGWLLDQYLEQRETSRNPLSRAASFASRVRRLCHLLVHVEPPPGPSPEPSTRPFSKNSKGRDRSPAPSPVLPSSSLRNITQCWLSVVQEQVSRFLAAAWRAPDFVPRYCKLYEHLQRAGSELFGPRAAFMLALRSGFSGALLQQSFLTAAHMSEQFARYIDQQIQGGLIGGAPGVEMLGQLQRHLEPIMVLSGLELATTFEHFYQHYMADRLLSFGSSWLEGAVLEQIGLCFPNRLPQLMLQSLSTSEELQRQFHLFQLQRLDKLFLEQEDEEEKRLEEEEEEEEEEEAEKELFIEDPSPAISILVLSPRCWPVSPLCYLYHPRKCLPTEFCDALDRFSSFYSQSQNHPVLDMGPHRRLQWTWLGRAELQFGKQILHVSTVQMWLLLKFNQTEEVSVETLLKDSDLSPELLLQALVPLTSGNGPLTLHEGQDFPHGGVLRLHEPGPQRSGEALWLIPPQAYLNVEKDEGRTLEQKRNLLSCLLVRILKAHGEKGLHIDQLVCLVLEAWQKGPNPPGTLGHTVAGGVACTSTDVLSCILHLLGQGYVKRRDDRPQILMYAAPEPMGPCRGQADVPFCGSQSETSKPSPEAVATLASLQLPAGRTMSPQEVEGLMKQTVRQVQETLNLEPDVAQHLLAHSHWGAEQLLQSYSEDPEPLLLAAGLCVHQAQAVPVRPDHCPVCVSPLGCDDDLPSLCCMHYCCKSCWNEYLTTRIEQNLVLNCTCPIADCPAQPTGAFIRAIVSSPEVISKYEKALLRGYVESCSNLTWCTNPQGCDRILCRQGLGCGTTCSKCGWASCFNCSFPEAHYPASCGHMSQWVDDGGYYDGMSVEAQSKHLAKLISKRCPSCQAPIEKNEGCLHMTCAKCNHGFCWRCLKSWKPNHKDYYNCSAMVSKAARQEKRFQDYNERCTFHHQAREFAVNLRNRVSAIHEVPPPRSFTFLNDACQGLEQARKVLAYACVYSFYSQDAEYMDVVEQQTENLELHTNALQILLEETLLRCRDLASSLRLLRADCLSTGMELLRRIQERLLAILQHSAQDFRVGLQSPSVEAWEAKGPNMPGSQPQASSGPEAEEEEEDDEDDVPEWQQDEFDEELDNDSFSYDESENLDQETFFFGDEEEDEDEAYD

SEQ ID NO: 791 - protein, 2414 aa, Homo sapiens
MAENVVEPGPPSAKRPKLSSPALSASASDGTDFGSLFDLEHDLPDELINSTELGLTNGGDINQLQTSLGMVQDAASKHKQLSELLRSGSSPNLNMGVGGPGQVMASQAQQSSPGLGLINSMVKSPMTQAGLTSPNMGMGTSGPNQGPTQSTGMMNSPVNQPAMGMNTGMNAGMNPGMLAAGNGQGIMPNQVMNGSIGAGRGRQNMQYPNPGMGSAGNLLTEPLQQGSPQMGGQTGLRGPQPLKMGMMNNPNPYGSPYTQNPGQQIGASGLGLQIQTKTVLSNNLSPFAMDKKAVPGGGMPNMGQQPAPQVQQPGLVTPVAQGMGSGAHTADPEKRKLIQQQLVLLLHAHKCQRREQANGEVRQCNLPHCRTMKNVLNHMTHCQSGKSCQVAHCASSRQIISHWKNCTRHDCPVCLPLKNAGDKRNQQPILTGAPVGLGNPSSLGVGQQSAPNLSTVSQIDPSSIERAYAALGLPYQVNQMPTQPQVQAKNQQNQQPGQSPQGMRPMSNMSASPMGVNGGVGVQTPSLLSDSMLHSAINSQNPMMSENASVPSLGPMPTAAQPSTTGIRKQWHEDITQDLRNHLVHKLVQAIFPTPDPAALKDRRMENLVAYARKVEGDMYESANNRAEYYHLLAEKIYKIQKELEEKRRTRLQKQNMLPNAAGMVPVSMNPGPNMGQPQPGMTSNGPLPDPSMIRGSVPNQMMPRITPQSGLNQFGQMSMAQPPIVPRQTPPLQHHGQLAQPGALNPPMGYGPRMQQPSNQGQFLPQTQFPSQGMNVTNIPLAPSSGQAPVSQAQMSSSSCPVNSPIMPPGSQGSHIHCPQLPQPALHQNSPSPVPSRTPTPHHTPPSIGAQQPPATTIPAPVPTPPAMPPGPQSQALHPPPRQTPTPPTTQLPQQVQPSLPAAPSADQPQQQPRSQQSTAASVPTPTAPLLPPQPATPLSQPAVSIEGQVSNPPSTSSTEVNSQAIAEKQPSQEVKMEAKMEVDQPEPADTQPEDISESKVEDCKMESTETEERSTELKTEIKEEEDQPSTSATQSSPAPGQSKKKIFKPEELRQALMPTLEALYRQDPESLPFRQPVDPQLLGIPDYFDIVKSPMDLSTIKRKLDTGQYQEPWQYVDDIWLMFNNAWLYNRKTSRVYKYCSKLSEVFEQEIDPVMQSLGYCCGRKLEFSPQTLCCYGKQLCTIPRDATYYSYQNRYHFCEKCFNEIQGESVSLGDDPSQPQTTINKEQFSKRKNDTLDPELFVECTECGRKMHQICVLHHEIIWPAGFVCDGCLKKSARTRKENKFSAKRLPSTRLGTFLENRVNDFLRRQNHPESGEVTVRVVHASDKTVEVKPGMKARFVDSGEMAESFPYRTKALFAFEEIDGVDLCFFGMHVQEYGSDCPPPNQRRVYISYLDSVHFFRPKCLRTAVYHEILIGYLEYVKKLGYTTGHIWACPPSEGDDYIFHCHPPDQKIPKPKRLQEWYKKMLDKAVSERIVHDYKDIFKQATEDRLTSAKELPYFEGDFWPNVLEESIKELEQEEEERKREENTSNESTDVTKGDSKNAKKKNNKKTSKNKSSLSRGNKKKPGMPNVSNDLSQKLYATMEKHKEVFFVIRLIAGPAANSLPPIVDPDPLIPCDLMDGRDAFLTLARDKHLEFSSLRRAQWSTMCMLVELHTQSQDRFVYTCNECKHHVETRWHCTVCEDYDLCITCYNTKNHDHKMEKLGLGLDDESNNQQAAATQSPGDSRRLSIQRCIQSLVHACQCRNANCSLPSCQKMKRVVQHTKGCKRKTNGGCPICKQLIALCCYHAKHCQENKCPVPFCLNIKQKLRQQQLQHRLQQAQMLRRRMASMQRTGVVGQQQGLPSPTPATPTTPTGQQPTTPQTPQPTSQPQPTPPNSMPPYLPRTQAAGPVSQGKAAGQVTPPTPPQTAQPPLPGPPPAAVEMAMQIQRAAETQRQMAHVQIFQRPIQHQMPPMTPMAPMGMNPPPMTRGPSGHLEPGMGPTGMQQQPPWSQGGLPQPQQLQSGMPRPAMMSVAQHGQPLNMAPQPGLGQVGISPLKPGTVSQQALQNLLRTLRSPSSPLQQQQVLSILHANPQLLAAFIKQRAAKYANSNPQPIPGQPGMPQGQPGLQPPTMPGQQGVHSNPAMQNMNPMQAGVQRAGLPQQQPQQQLQPPMGGMSPQAQQMNMNHNTMPSQFRDILRRQQMMQQQQQQGAGPGIGPGMANHNQFQQPQGVGYPPQQQQRMQHHMQQMQQGNMGQIGQLPQALGAEAGASLQAYQQRLLQQQMGSPVQPNPMSPQQHMLPNQAQSPHLQGQQIPNSLSNQVRSPQPVPSPRPQSQPPHSSPSPRMQPQPSPHHVSPQTSSPHPGLVAAQANPMEQGHFASPDQNSMLSQLASNPGMANLHGASATDLGLSTDNSDLNSNLSQSTLDIH

SEQ ID NO: 792 - protein, 1169 aa, Homo sapiens
MEPRESGKAPVTFDDITVYLLQEEWVLLSQQQKELCGSNKLVAPLGPTVANPELFRKFGRGPEPWLGSVQGQRSLLEHHPGKKQMGYMGEMEVQGPTRESGQSLPPQKKAYLSHLSTGSGHIEGDWAGRNRKLLKPRSIQKSWFVQFPWLIMNEEQTALFCSACREYPSIRDKRSRLIEGYTGPFKVETLKYHAKSKAHMFCVNALAARDPIWAARFRSIRDPPGDVLASPEPLFTADCPIFYPPGPLGGFDSMAELLPSSRAELEDPGGDGAIPAMYLDCISDLRQKEITDGIHSSSDINILYNDAVESCIQDPSAEGLSEEVPVVFEELPVVFEDVAVYFTREEWGMLDKRQKELYRDVMRMNYELLASLGPAAAKPDLISKLERRAAPWIKDPNGPKWGKGRPPGNKKMVAVREADTQASAADSALLPGSPVEARASCCSSSICEEGDGPRRIKRTYRPRSIQRSWFGQFPWLVIDPKETKLFCSACIERPNLHDKSSRLVRGYTGPFKVETLKYHEVSKAHRLCVNTVEIKEDTPHTALVPEISSDLMANMEHFFNAAYSIAYHSRPLNDFEKILQLLQSTGTVILGKYRNRTACTQFIKYISETLKREILEDVRNSPCVSVLLDSSTDASEQACVGIYIRYFKQMEVKESYITLAPLYSETADGYFETIVSALDELDIPFRKPGWVVGLGTDGSAMLSCRGGLVEKFQEVIPQLLPVHCVAHRLHLAVVDACGSIDLVKKCDRHIRTVFKFYQSSNKRLNELQEGAAPLEQEIIRLKDLNAVRWVASRRRTLHALLVSWPALARHLQRVAEAGGQIGHRAKGMLKLMRGFHFVKFCHFLLDFLSIYRPLSEVCQKEIVLITEVNATLGRAYVALESLRHQAGPKEEEFNASFKDGRLHGICLDKLEVAEQRFQADRERTVLTGIEYLQQRFDADRPPQLKNMEVFDTMAWPSGIELASFGNDDILNLARYFECSLPTGYSEEALLEEWLGLKTIAQHLPFSMLCKNALAQHCRFPLLSKLMAVVVCVPISTSCCERGFKAMNRIRTDERTKLSNEVLNMLMMTAVNGVAVTEYDPQPAIQHWYLTSSGRRFSHVYTCAQVPARSPASARLRKEEMGALYVEEPRTQKPPILPSREAAEVLKDCIMEPPERLLYPHTSQEAPGMS

SEQ ID NO: 793 - protein, 261 aa, Homo sapiens
MHMRETSGFTLKKGRSAPLVFHPPDALIAVPFDDDDKIVGGYTCEENSLPYQVSLNSGSHFCGGSLISEQWVVSAAHCYKTRIQVRLGEHNIKVLEGNEQFINAAKIIRHPKYNRDTLDNDIMLIKLSSPAVINARVSTISLPTAPPAAGTECLISGWGNTLSFGADYPDELKCLDAPVLTQAECKASYPGKITNSMFCVGFLEGGKDSCQRDSGGPVVCNGQLQGVVSWGHGCAWKNRPGVYTKVYNYVDWIKDTIAANS

1. A method of assessing whether a subject is afflicted with pancreatic cancer, the method comprising
determining the level of at least one pancreatic cancer biomarker in a sample derived from said subject; and
comparing the level of the pancreatic cancer biomarker with the level of the pancreatic cancer biomarker in a control sample, wherein a difference between the level of the pancreatic cancer biomarker derived from said subject and the pancreatic cancer biomarker in the control sample is an indication that the subject is afflicted with pancreatic cancer.

2. The method of claim 1, wherein the pancreatic cancer biomarker is
(a) CA 19-9,
(b) a protein comprising an amino acid sequence selected from the group consisting of SEQ ID NOs: 1-31 or 39-793, or a fragment thereof,
(c) a protein comprising an amino acid sequence selected from the group consisting of SEQ ID NOs: 1-19, 47, 49, 55-58, 206, 726, 729, 780 or 793, or a fragment thereof, or
(d) a nucleotide sequence encoding the protein.

3-4. (canceled)

5. The method of claim 1, wherein the sample is selected from the group consisting of a fecal sample, a gastrointestinal lavage fluid, and a combination thereof.

6. (canceled)

7. The method of claim 1, comprising determining the level of at least 2, 3, 4, 6, 7, 8, 9 or 10 pancreatic cancer biomarkers and comparing the level of each of the pancreatic cancer biomarkers to the respective level of the pancreatic cancer biomarkers in the control sample.

8. (canceled)

9. The method of claim 1, wherein the subject is a human.

10. The method of claim 1, further comprising administering a lavage fluid and collecting the sample, optionally
(a) wherein the sample is a gastrointestinal lavage fluid,
(b) wherein the lavage fluid is administered orally,
(c) wherein the lavage fluid comprises an ingredient selected from the group consisting of polyethylene glycol, magnesium sulfate, sodium sulfate, potassium sulfate, magnesium citrate, ascorbic acid, sodium picosulfate, and bisacodyl, and/or
(d) wherein the lavage fluid is selected from the group consisting of GOLYTELY, HALFLYTELY, NULYTELY, SUPREP, FLEET'S PHOSPHO-SODA, magnesium citrate, and their generic equivalents.

11-14. (canceled)

15. The method of claim 1, further comprising partially purging the subject's gastrointestinal system and collecting gastrointestinal lavage fluid.

16. The method of claim 1, wherein the difference is a decrease in the level of the pancreatic cancer biomarker derived from said subject and the pancreatic cancer biomarker in the control sample, and wherein said decrease is an indication that the subject is afflicted with pancreatic cancer, optionally, wherein the level of the pancreatic cancer biomarker derived from said subject is at least 3, 5, 10 or 100 times less than the level of the pancreatic cancer biomarker in the control sample.

17-18. (canceled)

19. The method of claim 16, wherein the pancreatic cancer biomarker is a protein encoded by an amino acid sequence selected from the group consisting of SEQ ID NOs:1-16, 49, 55-58, 206 and 793, or a fragment thereof.

20. The method of claim 1, wherein the difference is an increase in the level of the pancreatic cancer biomarker derived from said subject and the pancreatic cancer biomarker in the control sample, and wherein said increase is an indication that the subject is afflicted with pancreatic cancer, optionally, wherein the level of the pancreatic cancer biomarker derived from said subject is at least 3, 5, 10 or 100 times more than the level of the pancreatic cancer biomarker in the control sample.

21-22. (canceled)

23. The method of claim 20, wherein the pancreatic cancer biomarker is CA19-9 or is a protein encoded by an amino acid sequence selected from the group consisting of SEQ ID NOs:17-19, 47, 726, 729 or 780, or a fragment thereof.

24. The method of claim 1, wherein the pancreatic cancer biomarker is derived from the pancreas.

25. The method of claim 1, wherein the pancreatic cancer is selected from the group consisting of an exocrine pancreatic cancer, a pancreatic cystic neoplasm and a pancreatic endocrine cancer, optionally, wherein
(a) the exocrine pancreatic cancer is selected from the group consisting of pancreatic ductal adenocarcinoma (PDAC), adenosquamous carcinoma, squamous cell carcinoma, giant cell carcinoma, acinar cell carcinoma and small cell carcinoma, or
(b) the pancreatic endocrine cancer is selected from the group consisting of insulinomas, glucagonomas, somatostatinomas, gastrinomas, VlPomas and non-secreting islet tumors of the pancreas.

26-28. (canceled)

29. The method of claim 1, wherein determining the level of said at least pancreatic cancer biomarker comprises
(a) performing an immunoassay or a colorimetric assay, optionally, wherein the immunoassay m the group consisting of a Western blot, an enzyme linked immunoabsorbent assay (ELISA), and a radioimmunoassay,
(b) performing mass spectrometry, or
(c) applying said sample to a solid phase test strip or a flow-through strip comprising an agent which selectively binds to said pancreatic cancer biomarker; and
detecting said pancreatic cancer biomarker bound to said agent on said solid phase test strip or said flow-through strip.

30-33. (canceled)

34. The method of claim 1, further comprising comparing the level of the pancreatic cancer biomarker from the subject with the level of at least one control polypeptide, or fragment thereof, or a nucleic acid encoding said at least one control polypeptide, derived from the sample, optionally wherein the control polypeptide
(a) is a non-pancreatic polypeptide that originates in the gastrointestinal tract, or
(b) is CA19-19 or comprises an amino acid sequence selected from the group consisting of SEQ ID NOs: 27, 32-40, 45, 54, and 59, or a fragment thereof.

35-36. (canceled)

37. A method of assessing the progression of pancreatic cancer in a subject afflicted with pancreatic cancer, the method comprising
determining the level of at least one pancreatic cancer biomarker in a sample derived from said subject; and
comparing the level of the pancreatic cancer biomarker with the level of the pancreatic cancer biomarker in a control sample, wherein a decrease in the level of the pancreatic cancer biomarker derived from said subject and the pancreatic cancer biomarker in the control sample is an indication that the pancreatic cancer will progress rapidly; and wherein an increase in the level of the pancreatic cancer biomarker derived from said subject and the pancreatic cancer biomarker in the control sample is an indication that the pancreatic cancer will progress slowly or will regress;
optionally, wherein the pancreatic cancer biomarker is CA19-9, a protein encoded by an amino acid sequence selected from the group consisting of SEQ ID NOs:1-31 or 39-793, a fragment thereof, or a nucleotide sequence encoding the protein or fragment thereof.

38. The method of claim 37, wherein the pancreatic cancer biomarker is
(a) a protein encoded by an amino acid sequence selected from the group consisting of SEQ ID NOs:1-16, 49, 55-58, 206 and 793, or a fragment thereof, or
(b) a nucleotide sequence encoding the protein or the fragment thereof.

39. (canceled)

40. A method of assessing the progression of pancreatic cancer in a subject afflicted with pancreatic cancer, the method comprising
determining the level of at least one pancreatic cancer biomarker in a sample derived from said subject; and
comparing the level of the pancreatic cancer biomarker with the level of the pancreatic cancer biomarker in a control sample, wherein an increase in the level of the pancreatic cancer biomarker derived from said subject and the pancreatic cancer biomarker in the control sample is an indication that the pancreatic cancer will progress rapidly; and wherein a decrease in the level of the pancreatic cancer biomarker derived from said subject and the pancreatic cancer biomarker in the control sample is an indication that the pancreatic cancer will progress slowly or will regress;
optionally, wherein the pancreatic cancer biomarker is CA19-9, a protein encoded by an amino acid sequence selected from the group consisting of SEQ ID NOs:1-31 or 39-793, a fragment thereof, or a nucleotide sequence encoding the protein or fragment thereof.

41. The method of claim 40, wherein the pancreatic cancer biomarker is
(a) CA19-9 or is a protein encoded by an amino acid sequence selected from the group consisting of SEQ ID NOs:17-19, 47, 726, 729 or 780, or a fragment thereof, or
(b) a nucleotide sequence encoding the protein or the fragment thereof.

42-66. (canceled)

67. A method of monitoring the efficacy of treatment of pancreatic cancer in a subject suffering from pancreatic cancer, the method comprising
determining the level of at least one pancreatic cancer biomarker in a sample derived from said subject, wherein said subject has been previously exposed to treatment for pancreatic cancer; and
comparing the level of the pancreatic cancer biomarker with the level of the pancreatic cancer biomarker in a control sample, wherein a decrease in the level of the pancreatic cancer biomarker derived from said subject and the pancreatic cancer biomarker in the control sample is an indication that the treatment is not efficacious; and wherein an increase in the level of the pancreatic cancer biomarker derived from said subject and the pancreatic cancer biomarker in the control sample is an indication that the pancreatic cancer is efficacious;
optionally, wherein the pancreatic cancer biomarker is CA19-9, a protein encoded by an amino acid sequence selected from the group consisting of SEQ ID NOs:1-31 or 39-793, a fragment thereof, or a nucleotide sequence encoding the protein or fragment thereof.

68. The method of claim 67, wherein the pancreatic cancer biomarker is
(a) a protein encoded by an amino acid sequence selected from the group consisting of SEQ ID NOs:1-16, 49, 55-58, 206 and 793, or a fragment thereof, or
(b) a nucleotide sequence encoding the protein or the fragment thereof.

69. (canceled)

70. A method of monitoring the efficacy of treatment of pancreatic cancer in a subject suffering from pancreatic cancer, the method comprising
determining the level of at least one pancreatic cancer biomarker in a sample derived from said subject, wherein said subject has been previously exposed to treatment for pancreatic cancer; and
comparing the level of the pancreatic cancer biomarker with the level of the pancreatic cancer biomarker in a control sample, wherein an increase in the level of the pancreatic cancer biomarker derived from said subject and the pancreatic cancer biomarker in the control sample is an indication that the treatment is not efficacious; and wherein a decrease in the level of the pancreatic cancer biomarker derived from said subject and the pancreatic cancer biomarker in the control sample is an indication that the pancreatic cancer is efficacious;
optionally, wherein the pancreatic cancer biomarker is CA19-9, a protein encoded by an amino acid sequence selected from the group consisting of SEQ ID NOs:1-31 or 39-793, a fragment thereof, or a nucleotide sequence encoding the protein or fragment thereof.

71. The method of claim 70, wherein the pancreatic cancer biomarker is
(a) CA19-9 or is a protein encoded by an amino acid sequence selected from the group consisting of SEQ ID NOs:17-19, 47, 726, 729 or 780, or a fragment thereof, or
(b) a nucleotide sequence encoding the protein or the fragment thereof.

72. (canceled)

73. A method of treating a subject having pancreatic cancer, the method comprising
determining the level of at least one pancreatic cancer biomarker in a sample derived from said subject;
comparing the level of the pancreatic cancer biomarker with the level of the pancreatic cancer biomarker in a control sample, wherein a difference between the level of the pancreatic cancer biomarker derived from said subject and the pancreatic cancer biomarker in the control sample is an indication that the subject is afflicted with pancreatic cancer; and
exposing said subject to therapeutically effective treatment, thereby treating the subject having pancreatic cancer.

74. A kit for determining the presence, absence or progression of pancreatic cancer in a subject comprising an agent that selectively binds to at least one pancreatic cancer biomarker.

75. The kit of claim 74, wherein the pancreatic cancer biomarker is
(a) a protein comprising an amino acid sequence selected from the group consisting of SEQ ID NOs: 1-31 or 39-793, or a fragment thereof, or
(b) a nucleotide sequence encoding the protein or the fragment thereof.

76-85. (canceled)
